(19) United States
(12) Patent Application Publication
(10) Pub. No.: US 2022/0307013 A1
(43) Pub. Date: Sep. 29, 2022

(54) GENE FRAGMENT OVEREXPRESSION SCREENING METHODOLOGIES, AND USES THEREOF

(71) Applicant: The Regents of the University of California, Oakland, CA (US)

(72) Inventors: Prashant Mali, La Jolla, CA (US); Kyle M. Ford, La Jolla, CA (US); Nathan Palmer, La Jolla, CA (US); Rebecca Panwala, La Jolla, CA (US)

(21) Appl. No.: 17/638,428

(22) PCT Filed: Aug. 28, 2020
(86) PCT No.: PCT/US2020/048594

§ 371 Date: Feb. 25, 2022

Related U.S. Application Data
(60) Provisional application No. 62/894,664, filed on Aug. 30, 2019.
(60) Provisional application No. 62/980,649, filed on Feb. 24, 2020.
(60) Provisional application No. 63/030,898, filed on May 27, 2020.

(51) Int. Cl. C12N 15/10; C07K 14/47; C07K 14/71; C07K 14/82

(52) U.S. Cl. CPC C12N 15/1079; C07K 14/4703; C07K 14/71; C07K 14/82; A61K 38/00

(57) ABSTRACT

The disclosure provides for screening methodologies using gene fragment overexpression that provide for the identification of peptide sequences which can modulate the functional regions of proteins of interests, and uses thereof. The disclosure further relates to peptide, polypeptide and polynucleotide identified by the methods of the disclosure, compositions containing such peptide, polypeptide and polynucleotides and uses thereof.

### CROSS REFERENCE TO RELATED APPLICATIONS

[0001] This application claims priority under 35 U.S.C. § 119 from Provisional Application Ser. No. 62/894,664, filed Aug. 30, 2019; Provisional Application Ser. No. 62/980,649, filed Feb. 24, 2020; and Provisional Application Ser. No. 63/030,898, filed May 27, 2020; the disclosures of each of which are incorporated herein by reference in their entirety.

### STATEMENT REGARDING FEDERALLY SPONOSORED RESEARCH

[0002] This invention was made with Government support under CA222826, GM123313, and HG009285 awarded by the National Institutes of Health and under DGE-1650112 awarded by the National Science Foundation. The government has certain rights in the invention.

### TECHNICAL FIELD

[0003] The disclosure provides for screening methodologies using gene fragment overexpression that provide for the identification of peptide sequences which can modulate the functional regions of proteins of interests, and uses thereof. The disclosure further provides peptides and methods use for inhibiting oncoproteins and infectious agents.

### INCORPORATION BY REFERENCE OF SEQUENCE LISTING

[0004] Accompanying this filing is a Sequence Listing entitled, “Sequence-listing_ST25” created on Aug. 28, 2020 and having 6,298,535 bytes of data, machine formatted on IBM-PC, MS-Windows operating system. The sequence listing is hereby incorporated by reference in its entirety for all purposes.

### BACKGROUND

[0005] Genetic screening has rapidly become a ubiquitous tool to probe protein function and accelerate drug discovery. Libraries of genetically encoded perturbations (CRISPR-Cas9 sgRNA, siRNA, etc.) enable high throughput identification of proteins essential to cancer cells fitness and infectious organisms. However, existing screens typically fail to capture how proteins function biologically and provide little information on how to target hits therapeutically. Transposon mediated fragmentation and overexpression of cDNA has been used to identify peptide inhibitors of essential proteins in Saccharomyces cerevisiae. However, these libraries randomly generate gene fragments of various lengths hindering control of library composition, feature many out of frame fragments, and are limited in their translational relevance due to the choice of model organism.

### SUMMARY

[0006] Disclosed herein are pharmaceutical compositions in unit dose form comprising: (a) a peptide or salt thereof; and (b) at least one of a pharmaceutically acceptable: excipient, diluent, or carrier. In some embodiments, a peptide or salt thereof can have at least about 80% sequence identity to a polypeptide of any one of SEQ ID NO: 1-9489. In some embodiments, a peptide or salt thereof (i) can modulate an expression level of a target protein implicated in a disease or condition, as measured by an at least partial increase or an at least partial decrease of a level of the target protein in an in vitro assay in a cell treated with the peptide or salt thereof as determined by a Western blot relative to a level of the target protein in an otherwise comparable cell not treated with the peptide or salt thereof; (ii) can produce an at least partial increase or an at least partial decrease of an activity of the target protein, as measured by a level of the activity of the target protein in a cell treated with the peptide or salt thereof relative to a level of activity of the target protein in an otherwise comparable cell not treated with the peptide or salt thereof as determined by an in vitro assay; (iii) can produce an at least partial increase or an at least partial decrease of an activity of a protein downstream of the target protein in a cellular pathway in a cell treated with the peptide or salt thereof relative to a level of activity of the protein downstream of the target protein in a cellular pathway in an otherwise comparable cell not treated with the peptide or salt thereof as determined by an in vitro assay;(iv) can kill a cancer cell in an in vitro assay; or (v) any combination of (i-iv). In some embodiments, a peptide or salt thereof can comprise at least about an 80% sequence identity to a polypeptide of SEQ ID NO:9530. In some embodiments, a peptide or salt thereof can comprise at least about an 80% sequence identity to a polypeptide of SEQ ID NO:9522.

[0007] In some embodiments, a peptide or salt thereof can comprise at least about an 80% sequence identity to a polypeptide of SEQ ID NO:9521 or SEQ ID NO:9526. In some embodiments, a peptide or salt thereof can comprise at least about an 80% sequence identity to the polypeptide of SEQ ID NO:9531 or SEQ ID NO:9701. In some embodiments, a peptide or salt thereof can modulate an expression level of a target protein implicated in a disease or condition, as measured by an at least partial increase or the at least partial decrease of a level of the target protein in the in vitro assay in a cell treated with the peptide or salt thereof as determined by the Western blot relative to a level of the target protein in the otherwise comparable cell not treated with the peptide or salt thereof. In some embodiments, a target protein can be at least partially encoded by a gene in Table 7, a variant of a gene in Table 7, or a fragment of any of these. In some embodiments, a peptide or salt thereof can produce an at least partial increase or an at least partial decrease of an activity of a target protein, as measured by a level of the activity of the target protein in the cell treated with the peptide or salt thereof relative to a level of activity of the target protein in the otherwise comparable cell not treated with the peptide or salt thereof as determined by the in vitro assay. In some embodiments, a target protein can be at least partially encoded by a gene in Table 7, a variant of a gene in Table 7, or a fragment of any of these. In some embodiments, a target protein can be a kinase or a biologically active fragment thereof. In some embodiments, a target protein can be a phosphatase or a biologically active fragment thereof. In some embodiments, a peptide or salt thereof can produce an at least partial increase or an at least partial decrease of an activity of a protein downstream of a target protein in a cellular pathway in the cell treated with the peptide or salt thereof relative to a level of activity of the protein downstream of the target protein in the cellular pathway in an otherwise comparable cell not treated with the peptide or salt thereof as determined by an in vitro assay. In some embodiments, a target protein can be at least partially encoded by a gene in Table 7, a variant of a gene in Table 7, or a fragment of any of these. In some embodiments, a target protein can comprise a protein at least partially encoded by a gene in Table 7, a variant of a gene in Table 7, or a fragment of any of these. In some embodiments, a peptide of salt thereof can kill a cancer cell in an in vitro assay. In some embodiments, a peptide or salt thereof can modulate a target protein by at least partially inhibiting a protein to protein interaction. In some embodiments, a protein to protein interaction can comprise a ligand to receptor interaction. In some embodiments, a protein to protein interaction can comprise a regulatory protein complex. In some embodiments, a peptide or salt thereof can at least partially reduce a protein to nucleic acid interaction. In some embodiments, a peptide can comprise independently Gly, or an amino acid comprising a C₁-C₁₀ alkyl, a C₁-C₁₀ alkenyl, a C₁-C₁₀ alkynyl, a cycloalkyl, or an alkylcycloalkyl side chain. In some embodiments, a peptide can comprise an amino acid comprising an aromatic side chain. In some embodiments, a peptide can comprise an amino acid comprising a side chain that can be at least partially protonated at a pH of about 7.3. In some embodiments, a peptide can comprise an amino acid comprising an amide containing side chain. In some embodiments, a peptide can comprise an amino acid comprising an alcohol or thiol containing side chain. In some embodiments, a peptide can comprise an amino acid comprising a side chain that can be at least partially deprotonated at a pH of about 7.3. In some embodiments, a peptide or salt thereof can comprise a recombinant peptide. In some embodiments, at least one amino acid of the peptide or salt thereof can comprise a chemical modification. In some embodiments, a chemical modification can comprise acetylation, sulfonation, amidation, or esterification. In some embodiments, a peptide or salt thereof can comprise a stapled peptide or salt thereof, a stitched peptide or salt thereof, a macrocyclic peptide or salt thereof, or any combination thereof. In some embodiments, peptide or salt thereof can comprise a stapled peptide and the stapled peptide can comprise a covalent linkage between two amino acid side-chains. In some embodiments, a peptide or salt thereof can further comprise a cell penetrating peptide directly or indirectly linked to a peptide or salt thereof. In some embodiments, an amino acid of the peptide or salt thereof positioned at an end terminus can comprise a side chain that can be at least partially deprotonated at a pH of about 7.3.

[0008] Also disclosed herein are nucleic acids. In some embodiments, a nucleic acid can at least partially encode a peptide, having at least about 80% sequence identity to a polypeptide of SEQ ID NO:1-9489 or 9701. In some embodiments, the peptide; (i) can modulate an expression level of a target protein implicated in a disease or condition, as measured by an at least partial increase or an at least partial decrease of a level of the target protein in an in vitro assay in a cell treated with the nucleic acid as determined by a Western blot relative to a level of the target protein in an otherwise comparable cell not treated with the nucleic acid; (ii) can produce an at least partial increase or an at least partial decrease of an activity of the target protein, as measured by a level of the activity of the target protein in a cell treated with the nucleic acid relative to a level of activity of the target protein in an otherwise comparable cell not treated with the nucleic acid in as determined by an in vitro assay; (iii) can produce an at least partial increase or an at least partial decrease of an activity of a protein downstream of the target protein in a cellular pathway in a cell treated with the nucleic acid relative to a level of activity of the protein downstream of the target protein in a cellular pathway in an otherwise comparable cell not treated with the nucleic acid as determined by an in vitro assay; (iv) can kill a cancer cell in an in vitro assay; or (v) any combination of (i-iv). In some embodiments, a peptide at least partially encoded by the nucleic acid may not comprise more than about 40 amino acids. In some embodiments, a nucleic acid can be comprised in a pharmaceutical composition in unit dose form. In some embodiments, a peptide at least partially encoded by the nucleic acid can comprise independently Gly, or an amino acid comprising a C₁-C₁₀ alkyl, a C₁-C₁₀ alkenyl, a C₁-C10 alkynyl, a cycloalkyl, or an alkylcycloalkyl side chain. In some embodiments, a peptide at least partially encoded by a nucleic acid can comprise an amino acid comprising an aromatic side chain. In some embodiments, a peptide at least partially encoded by a nucleic acid can comprise an amino acid comprising a side chain that can be at least partially protonated at a pH of about 7.3. In some embodiments, a peptide at least partially encoded by a nucleic acid can comprise an amino acid comprising an amide containing side chain. In some embodiments, a peptide at least partially encoded by a nucleic acid can comprise an amino acid comprising an alcohol or thiol containing side chain. In some embodiments, a peptide at least partially encoded by a nucleic acid can comprise an amino acid comprising a side chain that can be at least partially deprotonated at a pH of about 7.3. In some embodiments, a nucleic acid can be double stranded. In some embodiments, a nucleic acid can comprise DNA, RNA or any combination thereof.

[0009] Also disclosed herein are vectors that comprise a nucleic acid of the disclosure. In some embodiments, a vector can comprise a polypeptide coat. In some embodiments, a vector can comprise a nanoparticle, a microparticle, a viral vector, a virus-like particle, a liposome, or any combination thereof. In some embodiments, a vector can comprise a viral vector, and the viral vector can comprise an AAV vector. In some embodiments, an AAV vector can be selected from the group consisting of: AAV1, AAV2, AAV3, AAV4, AAV5, AAV6, AAV7, AAV8, AAV9, AAV10, AAV11, AAV12, AAVDJ, and variants thereof. In some embodiments, the vector can be a gamma-retroviral vector.

[0010] Also disclosed herein are isolated peptides or salt thereof comprising a sequence having at least about 80% sequence homology to any one of the peptides of SEQ ID NO: 1-9489 or 9701.

[0011] Also disclosed herein is a kit that comprises a pharmaceutical composition, a nucleic acid, a vector, an isolated peptide or salt thereof; and a container.

[0012] Provided herein is a method of at least partially treating or preventing a disease or condition in a subject. In some cases, the method comprises administering a therapeutically effective amount of a pharmaceutical composition, a nucleic acid, a vector, or an isolated peptide or salt thereof; to a subject to at least partially prevent or treat the disease or condition. In some cases, a method comprises at least partially treating a subject. In some cases, at least partially treating comprises ameliorating at least one symptom of a disease or condition. In some cases, a method comprises at least partially treating. In some cases, at least partially treating comprises reducing a growth of a tumor. In some cases, a method comprises at least partially treating. In some cases, at least partially treating comprises at least partially eliminating a tumor. In some cases, a disease or condition comprises a cancer. In some cases, a cancer comprises a sarcoma, a carcinoma, a melanoma, a lymphoma, a leukemia, a blastoma, a germ cell tumor, a myeloma, or any combination thereof. In some cases, prior to treating a subject, the subject has been diagnosed with cancer.

[0013] In some cases, a method provided herein can further comprise diagnosing a subject with cancer. In some cases, diagnosing comprises diagnosing with a physical examination, a biopsy, a radiological image, a blood test, a urine test, an antibody test, or any combination thereof. In some cases, diagnosing comprises radiological imagine. In some cases, radiological imaging comprises a computed tomography (CT) image, a nuclear scan, an X-Ray image, a magnetic resonance image (MRI), an ultrasound image, or any combination thereof. In some cases, administering can be intra-arterial, intravenous, intramuscular, oral, topical, intranasal, subcutaneous, inhalation, catheterization, gastrostomy tube administration, intraosseous, ocular, otic, transdermal, rectal, nasal, intravaginal, intracavernous, transurethral, sublingual, or any combination thereof. In some cases, administering can be performed at least about: 1 time per day, 2 times per day, 3 times per day, or 4 times per day. In some cases, administering can be performed for about: 1 day to about 7 days, 1 week to about 5 weeks, 1 month to about 12 months, 1 year to about 3 years, 3 years to about 8 years, or 8 years to about 20 years. In some cases, a method further comprises administering a therapeutically effective amount of a second therapy to a subject. In some cases, a second therapy comprises surgery, chemotherapy, radiation therapy, immunotherapy, hormone therapy, a checkpoint inhibitor, targeted drug therapy, a gene editing therapy, an RNA editing therapy, a protein knockdown therapy, chimeric antigen receptor (CAR) T-cell therapy, or a combination thereof.

[0014] In some cases, a subject is a human. In some cases, a human is from about 1 day to about 1 month old, from about 1 month to about 12 months old, from about 1 year to about 7 years old, from about 5 years to about 25 years old, from about 20 years to about 50 years old, from about 45 years to about 80 years old, or from about 75 years to about 130 years old.

[0015] Provided herein is a method of making a pharmaceutical composition. In some cases, a method comprises contacting a peptide or salt thereof with a pharmaceutically acceptable excipient, diluent or carrier.

[0016] Provided herein is a method of at least partially reducing or at least partially increasing activity of a target protein comprising: (a) expressing a fragment of a gene in a target cell, wherein the gene fragment is expressed from a polynucleotide, wherein the gene fragment comprises at least a portion of the target protein and wherein the gene fragment is from about 60 nucleotides to about 150 nucleotides in length; and (b) measuring the at least partial reduction or the at least partial increase of activity by determining a change of a level of activity of the target protein in a cell treated with the polynucleotide relative to a level of activity of the target protein in an otherwise comparable cell not treated with the polynucleotide an in vitro assay; wherein the target protein is selected from a protein at least partially encoded by a gene or a variant thereof recited in Table 7.

[0017] Provided herein is a method of at least partially reducing or at least partially increasing activity of a protein downstream of a target protein in a cellular pathway comprising: (a) expressing a fragment of a gene in a target cell, wherein the gene fragment is expressed from a polynucleotide, wherein the gene fragment comprises at least a portion of the target protein and wherein the gene fragment is from about 60 nucleotides to about 150 nucleotides in length; and (b) measuring the at least partial reduction or the at least partial increase of activity by determining a change of a level of activity of the downstream protein of a cell treated with the polynucleotide relative to a level of activity of the downstream protein in an otherwise comparable cell not treated with the polynucleotide in an in vitro assay; wherein the target protein is selected from a protein at least partially encoded by a gene or a variant thereof recited in Table 7. In some cases, a fragment of a gene encodes for a peptide comprising a sequence having at least about 80% sequence homology to any one of the peptides of SEQ ID NO: 1-9489 or 9701. In some cases, a polynucleotide is comprised in a plasmid. In some cases, a polynucleotide or a plasmid can be transfected into a target cell. In some cases, at least a portion of a target protein comprises about 20 amino acids to about 50 amino acids. In some cases, a reduction of activity further comprises reduced cell growth.

[0018] Provided herein is a method of screening for at least partially reducing or at least partially increasing activity of a target protein, a protein downstream of a target protein in a cellular pathway, or both comprising: (a) expressing one or more fragments of a gene in a target cell, wherein each gene fragment is expressed from a polynucleotide, wherein the one or more gene fragments comprise at least a portion of the target protein and wherein the gene fragment is from about 60 nucleotides to about 300 nucleotides in length; and (b) measuring the at least partial reduction or the at least partial increase of activity by determining a change of a level of activity of the target protein in a cell treated with the polynucleotide relative to a level of activity of the target protein in an otherwise comparable cell not treated with the polynucleotide in an in vitro assay; wherein the target protein is selected from a protein encoded by a gene or a variant thereof recited in Table 7. In some cases, a fragment of a gene encodes for a peptide comprising a sequence having at least about 80% sequence homology to any one of peptides of SEQ ID Nos: 1-9489. In some cases, a polynucleotide is comprised in a plasmid. In some cases, a polynucleotide or a plasmid is transfected into a target cell. In some cases, at least a portion of a target protein comprises about 20 amino acids to about 50 amino acids.

[0019] The disclosure also provides a composition comprising a peptide fragment, wherein the peptide fragment consists of 35-45 amino acids from a protein selected from the group consisting of AKT1, AR, ARAF, BRAF, CASP8, CCND1, CDH1, CDKN2A, CHEK2, CTNNB1, DDX3X, DICER1, EGFR, EP300, ERBB2, ERBB3, ERBB4, FBXW7, FGFR2, FGFR3, FLT3, GFP, GNA11, GNAQ, HPRT1, HRAS, IDH1, IDH2, KEAP1, KIT, KMT2C, KRAS, KRAS4B, MAP2K1, MAX, MDM2, MDM4, MET, MTOR, MYC, MYCL, MYCN, NCOA3, NFE2L2, NKX2, NOTCH1, NRAS, OMOMYC, PIK3CA, PIK3R1, PPP2R1A, PTPN11, RAB25, RAC1, RAF1, RASA1, RB1, RHEB, RHOA, RRAS2, RUNX1, SETD2, SF3B1, SKP2, SMAD2, SMAD4, SPOP, TERT, TGFBR2, TP53, VHL, YAP1, ZFP36L2, ACE1, ACE2, DPP4, DPP8, DPP9, ANPEP, FAP, and Fibronectin, wherein the peptide fragment at least partially inhibits the biological activity of the protein from which it has greater than 98% identity and/or binds to a cognate of the protein. In one embodiment, the peptide fragment is identified by: synthesizing a library of overlapping gene fragments from a gene that expresses the protein, wherein each gene fragment of the library of overlapping gene fragments has a unique nucleotide sequence, wherein each gene fragment has a sequence which partial overlaps with the sequences of least two or more gene fragments having nucleotide sequences from the gene; pooling and cloning the gene fragments into vectors, wherein each vector overexpresses one gene fragment when transduced or transfected into a cell; transfecting or transducing cells with the vectors comprising gene fragments, wherein each transduced or transfected cell has only one vector that comprises a gene fragment; screening the transfected or transduced cells for cell growth over various time points; sequencing and quantifying gene fragment abundance from each of the time points; and mapping the sequenced gene fragments back to the gene that express the target protein and providing a depletion score for each codon, wherein the depletion score is defined as the mean depletion/enrichment of all overlapping sequenced gene fragments, and wherein codons of the gene fragments which have a depletion score below a p=0.05 significance threshold, indicates peptide sequences which inhibit functional regions of the protein expressed by the gene. In another embodiment, the peptide fragment consists essentially of or consists of a sequence of 35-45 amino acids selected from the group consisting of: (a) a sequence of 35-40 amino acids located between amino acid 6 and 466 of SEQ ID NO:9540 and optionally wherein the peptide has a mutation as referenced to SEQ ID NO:9540 of 17K or 52R; (b) a sequence of 35-40 amino acids of SEQ ID NO:9542; (c) a sequence of 35-40 amino acids of SEQ ID NO:9544; (d) a sequence of 35-40 amino acids of SEQ ID NO:9546 and optionally wherein the peptide has a mutation as referenced to SEQ ID NO:9546 of 464V, 466E, 467L, 468C, 469A/R, 568D, 575K, 581I, 594G/N, 596D/S, 597Q/V, and/or 600E; (e) a sequence of 35-40 amino acids of SEQ ID NO:9548 and optionally wherein the peptide has a mutation as referenced to SEQ ID NO:9548 of 363D, and/or 367G; (f) a sequence of 35-40 amino acids of SEQ ID NO:9550; (g) a sequence of 35-40 amino acids of SEQ ID NO:9552 and optionally wherein the peptide has a mutation as referenced to SEQ ID NO:9552 of 222G, 257G/N, and/or 290G; (h) a sequence of 35-40 amino acids of SEQ ID NO:9554 and optionally wherein the peptide has a mutation as referenced to SEQ ID NO:9554 of 118T and/or 84Y; (i) a sequence of 35-40 amino acids of SEQ ID NO:9556 and optionally wherein the peptide has a mutation as referenced to SEQ ID NO:9556 of 381R, 388L/Y, 389H, 415F, and/or 452G; (j) a sequence of 35-40 amino acids of SEQ ID NO:9558 and optionally wherein the peptide has a mutation as referenced to SEQ ID NO:9558 of 32V, 34R, 333F, 334K, 335T, 383C/G, 386G, 387I/K/Y, and/or 426D; (k) a sequence of 35-40 amino acids of SEQ ID NO:9560 and optionally wherein the peptide has a mutation as referenced to SEQ ID NO:9560 of 528C and/or 532A/M; (1) a sequence of 35-40 amino acids of SEQ ID NO:9562 and optionally wherein the peptide has a mutation as referenced to SEQ ID NO:9562 of 1703S, 1705K, 1709N, 1806N, 1809R, 1810Y/V, and/or 1813D/G; (m) a sequence of 35-40 amino acids of SEQ ID NO:9564 and optionally wherein the peptide has a mutation as referenced to SEQ ID NO:9564 of 85M, 108G/K, 252C, 270C, 289T/V, 596R/S, 598V, 628F, 719C/D, 724S, 759N, 836H, 858R, 861Q, and/or 891C; (n) a sequence of 35-40 amino acids of SEQ ID NO:9566 and optionally wherein the peptide has a mutation as referenced to SEQ ID NO:9566 of 1397D, 1398P, 1399N, 1400I, 1414C/D, 1446C, and/or 1451P; (o) a sequence of 35-40 amino acids of SEQ ID NO:9568 and optionally wherein the peptide has a mutation as referenced to SEQ ID NO:9568 of 310F and/or 755M/S; (p) a sequence of 35-40 amino acids of SEQ ID NO:9570 and optionally wherein the peptide has a mutation as referenced to SEQ ID NO:9570 of 103H and/or 232V; (q) a sequence of 35-40 amino acids of SEQ ID NO:9572 and optionally wherein the peptide has a mutation as referenced to SEQ ID NO:9572 of 785R/V; (r) a sequence of 35-40 amino acids of SEQ ID NO:9574 and optionally wherein the peptide has a mutation as referenced to SEQ ID NO:9574 of 426L, 465C/H, 479Q, 502V, 505G/L, 516N/R, 517E/R, 520N, and/or 545C; (s) a sequence of 35-40 amino acids of SEQ ID NO:9576 and optionally wherein the peptide has a mutation as referenced to SEQ ID NO:9576 of 251Q and/or 545Q; (t) a sequence of 35-40 amino acids of SEQ ID NO:9578 and optionally wherein the peptide has a mutation as referenced to SEQ ID NO:9578 of 248C and/or 249C; (u) a sequence of 35-40 amino acids of SEQ ID NO:9580 and optionally wherein the peptide has a mutation as referenced to SEQ ID NO:9580 of 617E and/or 618L; (v) a sequence of 35-40 amino acids of SEQ ID NO:9582; (w) a sequence of 35-40 amino acids of SEQ ID NO:9584 and optionally wherein the peptide has a mutation as referenced to SEQ ID NO:9584 of 183C and/or 209H; (x) a sequence of 35-40 amino acids of SEQ ID NO:9586 and optionally wherein the peptide has a mutation as referenced to SEQ ID NO:9586 of 48V, 209P, and/or 247G; (y) a sequence of 35-40 amino acids of SEQ ID NO:9588; (z) a sequence of 35-40 amino acids of SEQ ID NO:9590 and optionally wherein the peptide has a mutation as referenced to SEQ ID NO:9590 of 12V, 13R/V, 59T, 60S/V, 61K/L, and/or 117N/R; (aa) a sequence of 35-40 amino acids of SEQ ID NO:9592 and optionally wherein the peptide has a mutation as referenced to SEQ ID NO:9592 of 132C/H; (bb) a sequence of 35-40 amino acids of SEQ ID NO:9594 and optionally wherein the peptide has a mutation as referenced to SEQ ID NO:9594 of 137E, 140Q, and/or 172G/K/S; (cc) a sequence of 35-40 amino acids of SEQ ID NO:9596 and optionally wherein the peptide has a mutation as referenced to SEQ ID NO:9596 of 152A, 333D/S, 413H, 477S, 483C, 524C, 525C, and/or 571D; (dd) a sequence of 35-40 amino acids of SEQ ID NO:9598 and optionally wherein the peptide has a mutation as referenced to SEQ ID NO:9598 of 559G, 573Q, 576P, 636V, 637H, 642E, 812V, and/or 816V/Y; (ee) a sequence of 35-40 amino acids of SEQ ID NO:9600 and optionally wherein the peptide has a mutation as referenced to SEQ ID NO:9600 of 370Y and/or 385Y; (ff) a sequence of 35-40 amino acids of SEQ ID NO:9602 and optionally wherein the peptide has a mutation as referenced to SEQ ID NO:9602 of 12R/V, 14I, 19F, 20R, 21R, 34L, 59G/T, 61K/R, 62K, 63K, and/or 117N; (gg) a sequence of 35-40 amino acids of SEQ ID NO:9604; (hh) a sequence of 35-40 amino acids of SEQ ID NO:9606 and optionally wherein the peptide has a mutation as referenced to SEQ ID NO:9606 of 121R, 124L/S and/or 130C; (ii) a sequence of 35-40 amino acids of SEQ ID NO:9608; (jj) a sequence of 35-40 amino acids of SEQ ID NO:9610; (kk) a sequence of 35-40 amino acids of SEQ ID NO:9612; (ll) a sequence of 35-40 amino acids of SEQ ID NO:9614 and optionally wherein the peptide has a mutation as referenced to SEQ ID NO:9614 of 1110I, 1246H, and/or 1248C/H; (mm) a sequence of 35-40 amino acids of SEQ ID NO:9616 and optionally wherein the peptide has a mutation as referenced to SEQ ID NO:9616 of 1977R, 1981E, 2215F, 2230V, and/or 2406A/M; (nn) a sequence of 35-40 amino acids of SEQ ID NO:9618; (oo) a sequence of 35-40 amino acids of SEQ ID NO:9620; (pp) a sequence of 35-40 amino acids of SEQ ID NO:9622; (qq) a sequence of 35-40 amino acids of SEQ ID NO:9624; (rr) a sequence of 35-40 amino acids of SEQ ID NO:9626 and optionally wherein the peptide has a mutation as referenced to SEQ ID NO:9626 of 77G, 79G/Q, 80A/I, 81S/V, and/or 82D/V; (ss) a sequence of 35-40 amino acids of SEQ ID NO:9628; (tt) a sequence of 35-40 amino acids of SEQ ID NO:9630 and optionally wherein the peptide has a mutation as referenced to SEQ ID NO:9630 of 440R and/or 449Y; (uu) a sequence of 35-40 amino acids of SEQ ID NO:9632 and optionally wherein the peptide has a mutation as referenced to SEQ ID NO:9632 of 12D, 13D/R, 16N, 61H/K/R, and/or 62K; (vv) a sequence of 35-40 amino acids of SEQ ID NO:9634; (ww) a sequence of 35-40 amino acids of SEQ ID NO:9636 and optionally wherein the peptide has a mutation as referenced to SEQ ID NO:9636 of 344G/M, 345I/Y, 365V, 420R, 471L, 539R, 545A/K, 546R, and/or 956F; (xx) a sequence of 35-40 amino acids of SEQ ID NO:9638 and optionally wherein the peptide has a mutation as referenced to SEQ ID NO:9638 of 375W, 376R, 379E/N, 557P, 560G/Y, 565R, 567E, and/or 568T; (yy) a sequence of 35-40 amino acids of SEQ ID NO:9640 and optionally wherein the peptide has a mutation as referenced to SEQ ID NO:9640 of 144C, 179R, 182W, 183Q/W, 217K/R, 220M, 256Y, 257C, 258C/H and/or 260G; (zz) a sequence of 35-40 amino acids of SEQ ID NO:9642 and optionally wherein the peptide has a mutation as referenced to SEQ ID NO:9642 of 60V, 71L, 72D, 76A/K, 279C, 282M, 461G/T, 498W, 503V, 504I, 507K, and/or 510H/L; (aaa) a sequence of 35-40 amino acids of SEQ ID NO:9644; (bbb) a sequence of 35-40 amino acids of SEQ ID NO:9646 and optionally wherein the peptide has a mutation as referenced to SEQ ID NO:9646 of 15S, 18Y, 29L/S, 61R, 68H, 135N, 178V; (ccc) a sequence of 35-40 amino acids of SEQ ID NO:9648; (ddd) a sequence of 35-40 amino acids of SEQ ID NO:9650 and optionally wherein the peptide has a mutation as referenced to SEQ ID NO:9650 of 789L; (eee) a sequence of 35-40 amino acids of SEQ ID NO:9652 and optionally wherein the peptide has a mutation as referenced to SEQ ID NO:9652 of 563S; (fff) a sequence of 35-40 amino acids of SEQ ID NO:9654 and optionally wherein the peptide has a mutation as referenced to SEQ ID NO:9654 of 60V; (ggg) a sequence of 35-40 amino acids of SEQ ID NO:9656 and optionally wherein the peptide has a mutation as referenced to SEQ ID NO:9656 of 17A, 22R, 37I, 42C, 47K, 59G/Y, 60K, 61D, 62E/R, 63K, 70S, 73P, and/or 161T/V; (hhh) a sequence of 35-40 amino acids of SEQ ID NO:9658 and optionally wherein the peptide has a mutation as referenced to SEQ ID NO:9658 of 72H/L; (iii) a sequence of 35-40 amino acids of SEQ ID NO:9660 and optionally wherein the peptide has a mutation as referenced to SEQ ID NO:9660 of 107L and/or 110N; (jjj) a sequence of 35-40 amino acids of SEQ ID NO:9662 and optionally wherein the peptide has a mutation as referenced to SEQ ID NO:9662 of 1543Q, 1603R, 1625C/L, and/or 1628T; (kkk) a sequence of 35-40 amino acids of SEQ ID NO:9664 and optionally wherein the peptide has a mutation as referenced to SEQ ID NO:9664 of 622Q, 625C/H, 626Y, 662R, 663P, 666E/N/T, 700E, 741E, 746V, 862K, 902G/K, and/or 903P; (lll) a sequence of 35-40 amino acids of SEQ ID NO:9666; (mmm) a sequence of 35-40 amino acids of SEQ ID NO:9668 and optionally wherein the peptide has a mutation as referenced to SEQ ID NO:9668 of 450E/N; (nnn) a sequence of 35-40 amino acids of SEQ ID NO:9670 and optionally wherein the peptide has a mutation as referenced to SEQ ID NO:9670 of 339L, 351G/H, 352R/V, 353C/N, 355V/Y, 356L/S, 361C/H, 363S, 365D/R, 366K, 368C, 382D, 383R, 384D, 3865/V, 406V, 408L, 504R, 507N, 509G, 523W, and/or 524L/R; (ooo) a sequence of 35-40 amino acids of SEQ ID NO:9672 and optionally wherein the peptide has a mutation as referenced to SEQ ID NO:9672 of 87N and/or 131G; (ppp) a sequence of 35-40 amino acids of SEQ ID NO:9674; (qqq) a sequence of 35-40 amino acids of SEQ ID NO:9676 and optionally wherein the peptide has a mutation as referenced to SEQ ID NO:9676 of 553H; (rrr) a sequence of 35-40 amino acids of SEQ ID NO:9678 and optionally wherein the peptide has a mutation as referenced to SEQ ID NO:9678 of 105C/V, 109S/V, 110P, 111R, 113V, 120E, 121Y, 125M/P, 126D/S, 127P/Y, 130R/V, 1311, 132E/N, 134L, 135R, 136E/H, 137Q, 138T/V, 141R/Y, 143A/M, 144H/P, 145P, 147G, 151S/H, 152L/S, 155P, 156P, 157D, 158S, 159P, 161D/T, 162F/N, 163C/H, 164E, 171K, 172D/F, 173G/L, 176F/R, 177R/S, 178Q, 179D/Q/R, 180K, 181C/H, 190L, 192R, 193N/R, 194F/H, 195F/M/N, 196P, 197G/L, 205N/S, 208G, 211I, 213L, 214R, 215G/I, 216E/L, 218E, 220C/H, 230P, 232S, 234C/H, 236C/H, 237I/K/V, 238R/W/Y, 239D, 240R, 241F/P, 2425/Y, 243I, 244D/S, 245D/S, 246T/V, 247I, 248Q/W, 249G/M/S, 250R, 251F/N, 253A, 254S, 255T, 256I, 257R, 258D/G/K, 259V/Y, 262V, 265P, 266R/V, 267Q/W, 270S/V, 271K/V, 272G/M, 273C/H, 274G/L, 275G/Y, 276G/P, 277G/Y, 278R/S, 279E/R, 280K/S, 281E/H/V, 282Q/W, 283P, 284P, 285K/V, 286G/Q, 332F, 334V/W, 337H/S, and/or 348F/S; (sss) a sequence of 35-40 amino acids of SEQ ID NO:9680 and optionally wherein the peptide has a mutation as referenced to SEQ ID NO:9680 of 79G, 80R, 82P, 89H, 115N, 117C, 118P, 120G, 128H, 130D/F, 131Y, 136V, 151F/N, 153P, 158R/V, 161Q, 162R, 165D, 178P, 184P, and/or 188P; (ttt) a sequence of 35-40 amino acids of SEQ ID NO:9682; (uuu) a sequence of 35-40 amino acids of SEQ ID NO:9684 and optionally wherein the peptide has a mutation as referenced to SEQ ID NO:9684 of 159Y; (vvv) a sequence of 35-40 amino acids of SEQ ID NO:9688; (www) a sequence of 35-40 amino acids of SEQ ID NO:9686; (xxx) a sequence of 35-40 amino acids of SEQ ID NO:9696; (yyy) a sequence of 35-40 amino acids of SEQ ID NO:9700; (zzz) a sequence of 35-40 amino acids of SEQ ID NO:9690; (aaaa) a sequence of 35-40 amino acids of SEQ ID NO:9692; (bbbb) a sequence of 35-40 amino acids of SEQ ID NO:9694; and (cccc) a sequence of 35-40 amino acids of SEQ ID NO:9698. In another embodiment, the peptide of (a) has the sequence selected from the group consisting of SEQ ID NO:1-5, 5000-5009 and 5010. In another embodiment, the peptide of (b) has the sequence selected from the group consisting of SEQ ID NO: 3499, 3750-3759, 5011-5072 and 5073. In another embodiment, the peptide of (c) has the sequence selected from the group consisting of SEQ ID NO: 5074-5083 and 5084. In another embodiment, the peptide of (d) has the sequence selected from the group consisting of SEQ ID NO: 6-15, 350-489, 2555-2586, 2949-2974, 3500-3509, 3760-3792, 5086-5184 and 5185. In another embodiment, the peptide of (e) has the sequence selected from the group consisting of SEQ ID NO: 490-498, 2587-2588, 2975-2981, 3511, 3793-3804, 5186-5227 and 5228. In another embodiment, the peptide of (f) has the sequence selected from the group consisting of SEQ ID NO: 5229-5249 and 5250. In another embodiment, the peptide of (g) has the sequence selected from the group consisting of SEQ ID NO: 499-514, 2589-2591, 2982, 3511, 3805-3816, 5251-5309 and 5310. In another embodiment, the peptide of (h) has the sequence selected from the group consisting of SEQ ID NO: 515-516 and 517. In another embodiment, the peptide of (i) has the sequence selected from the group consisting of SEQ ID NO: 518-592, 2592-2609, 2983-3009, 3443-3444, 3512-3514, 3817-3859, 5311-5449 and 5450. In another embodiment, the peptide of (j) has the sequence selected from the group consisting of SEQ ID NO: 16-27, 593-636, 2610-2629, 3010-3039, 3860-3862, 5451-5501 and 5502. In another embodiment, the peptide of (k) has the sequence selected from the group consisting of SEQ ID NO: 637-645, 2630-2634, 3040-3042, 3863-3878, 5503-5581 and 5582. In another embodiment, the peptide of (1) has the sequence selected from the group consisting of SEQ ID NO: 28-32, 646-671, 2635-2639, 3043-3059, 3445-3447, 3515-3532, 3879-3941, 5583-5862 and 5863. In another embodiment, the peptide of (m) has the sequence selected from the group consisting of SEQ ID NO: 33-49, 672-725, 2640-2655, 3060-3082, 3448, 3533-3536, 3942-3973, 5864-5933 and 5934. In another embodiment, the peptide of (n) has the sequence selected from the group consisting of SEQ ID NO: 50-59, 726-736, 2656-2660, 3083-3104 and 3105. In another embodiment, the peptide of (o) has the sequence selected from the group consisting of SEQ ID NO: 60, 737-742, 2661-2662, 3106-3107, 3537-3538, 3974-3985, 5935-5979 and 5980. In another embodiment, the peptide of (p) has the sequence selected from the group consisting of SEQ ID NO: 743-745, 3539-3544, 3986-3998, 5981-6063 and 6064. In another embodiment, the peptide of (q) has the sequence selected from the group consisting of SEQ ID NO: 746-751, 2663, 3108-3110, 3449-3451, 3545-3548, 3999-4047, 6065-6179 and 6180. In another embodiment, the peptide of (r) has the sequence selected from the group consisting of SEQ ID NO: 752-812, 2664-2668, 3111-3125, 3549, 4048-4061, 6181-6250 and 6251. In another embodiment, the peptide of (s) has the sequence selected from the group consisting of SEQ ID NO: 813-819, 2669-2671, 3126-3130, 4062-4075, 6252-6309 and 6310. In another embodiment, the peptide of (t) has the sequence selected from the group consisting of SEQ ID NO: 820-824, 6311-6322 and 6323. In another embodiment, the peptide of (u) has the sequence selected from the group consisting of SEQ ID NO: 825-855, 2672-2678, 3131, 3550-3572, 4076-4106, 6324-6470 and 6471. In another embodiment, the peptide of (v) has the sequence selected from the group consisting of SEQ ID NO: 856-857 and 858. In another embodiment, the peptide of (w) has the sequence selected from the group consisting of SEQ ID NO: 859-863, 3132, 4107, 6472-6480 and 6481. In another embodiment, the peptide of (x) has the sequence selected from the group consisting of SEQ ID NO: 61-63, 864-866, 2679-2682, 3133-3136, 6482-6509 and 6510. In another embodiment, the peptide of (y) has the sequence selected from the group consisting of SEQ ID NO: 64-65, 867-875, 2683, 3137-3146, 4108, 6511-6524 and 6525. In another embodiment, the peptide of (z) has the sequence selected from the group consisting of SEQ ID NO: 876-894, 2684, 3147-3149, 6526 and 6527. In another embodiment, the peptide of (aa) has the sequence selected from the group consisting of SEQ ID NO: 895-905, 3150-3152, 4109, 6528-6556 and 6557. In another embodiment, the peptide of (bb) has the sequence selected from the group consisting of SEQ ID NO: 66-69, 899-905, 4110-4111, 6558-6570 and 6571. In another embodiment, the peptide of (cc) has the sequence selected from the group consisting of SEQ ID NO: 906-921, 2685, 3153-3156, 4112, 6572-6581 and 6582. In another embodiment, the peptide of (dd) has the sequence selected from the group consisting of SEQ ID NO: 70-73, 922-950, 2686-2703, 3157-3184, 3573-3574, 4113-4127, 6583-6706 and 6707. In another embodiment, the peptide of (ee) has the sequence selected from the group consisting of SEQ ID NO: 951-961, and 3185. In another embodiment, the peptide of (ff) has the sequence selected from the group consisting of SEQ ID NO: 962-1052, 2704-2721, 3186-3198, 3452, 3575-3579, 4128-4158, 6708-6752 and 6753. In another embodiment, the peptide of (gg) has the sequence selected from the group consisting of SEQ ID NO: 4159-4167, 6754-6804 and 6805. In another embodiment, the peptide of (hh) has the sequence selected from the group consisting of SEQ ID NO: 74, 1053-1059, 2722, 3199-3202, 3580, 4168-4180, 6806-6847 and 6848. In another embodiment, the peptide of (ii) has the sequence selected from the group consisting of SEQ ID NO: 6849-6850 and 6851. In another embodiment, the peptide of (jj) has the sequence selected from the group consisting of SEQ ID NO: 3453-3455, 3581-3588, 4181-4221, 6852-6938 and 6939. In another embodiment, the peptide of (kk) has the sequence selected from the group consisting of SEQ ID NO: 3589-3595, 4222-4262, 6940-7051 and 7052. In another embodiment, the peptide of (ll) has the sequence selected from the group consisting of SEQ ID NO: 75, 1060-1071, 2723-2729, 3203-3216, 3456-3457, 3596-3600, 4263- 4297, 7053-7272 and 7273. In another embodiment, the peptide of (mm) has the sequence selected from the group consisting of SEQ ID NO: 76-77, 1072-1080, 3458, 3601, 4298-4311, 7274-7378 and 7379. In another embodiment, the peptide of (nn) has the sequence selected from the group consisting of SEQ ID NO: 4312-4317, 7380-7408 ad 7409. In another embodiment, the peptide of (oo) has the sequence selected from the group consisting of SEQ ID NO: 4318, 7410-7425 and 7426. In another embodiment, the peptide of (pp) has the sequence selected from the group consisting of SEQ ID NO: 3602, 4319-4327, 7427-7452 and 7453. In another embodiment, the peptide of (qq) has the sequence selected from the group consisting of SEQ ID NO: 3603, 4328-4378, 7454-7617 and 7618. In another embodiment, the peptide of (rr) has the sequence selected from the group consisting of SEQ ID NO: 1081-1183, 2730-2740, 3217-3221, 3459-3460, 3604-3634, 4379-4430, 7619-7693 and 7694. In another embodiment, the peptide of (ss) has the sequence selected from the group consisting of SEQ ID NO: 4431-4435, 7695-7711 and 7712. In another embodiment, the peptide of (tt) has the sequence selected from the group consisting of SEQ ID NO: 1184-1187, 4436, 7713-7751 and 7752. In another embodiment, the peptide of (uu) has the sequence selected from the group consisting of SEQ ID NO: 1188-1197, 2741-2747, 3222-3225, 4437-4444, 7753-7770 and 7771. In another embodiment, the peptide of (vv) has the sequence selected from the group consisting of SEQ ID NO: 4445-4447, 7772-7781 and 7782. In another embodiment, the peptide of (ww) has the sequence selected from the group consisting of SEQ ID NO: 78-111, 1198-1273, 2748-2788, 3226-3254, 3461-3463, 3635-3650, 4448-4565, 7783-8034 and 8035. In another embodiment, the peptide of (xx) has the sequence selected from the group consisting of SEQ ID NO: 112-151, 1274-1308, 2789-2825, 3255-3279, 3651-3655, 4566-4608, 8036-8179 and 8180. In another embodiment, the peptide of (yy) has the sequence selected from the group consisting of SEQ ID NO: 152- 153, 1309-1329, 2826, 3280-3287, 3656, 8181-8200 and 8201. In another embodiment, the peptide of (zz) has the sequence selected from the group consisting of SEQ ID NO: 154-171, 1330-1385, 2827- 2840, 3288-3301, 3464, 3657, 4609-4626, 8202-8309 and 8310. In another embodiment, the peptide of (aaa) has the sequence selected from the group consisting of SEQ ID NO: 4627, 8311-8212 and 8313. In another embodiment, the peptide of (bbb) has the sequence selected from the group consisting of SEQ ID NO: 172, 1386-1412, 2841-2845, 3302-3313, 3658-3661, 4628-4640, 8314-8338 and 8339. In another embodiment, the peptide of (ccc) has the sequence selected from the group consisting of SEQ ID NO: 3465-3467, 4641-4654, 8340-83402 and 8403. In another embodiment, the peptide of (ddd) has the sequence selected from the group consisting of SEQ ID NO: 1413-1417, 3314, 3468-3491, 3662-3674, 4655-4738, 8404-8619 and 8620. In another embodiment, the peptide of (eee) has the sequence selected from the group consisting of SEQ ID NO: 1418-1424, 2846-2856, 3315-3321, 3492-3494, 3675-3713, 4739-4823, 8621-8860 and 8861. In another embodiment, the peptide of (fff) has the sequence selected from the group consisting of SEQ ID NO: 1425-1432, 2857-2858, 3322-3329, 4824-4829, 8862-8900 and 8901. In another embodiment, the peptide of (ggg) has the sequence selected from the group consisting of SEQ ID NO: 173-175, 1433-1508, 2859-2872, 3330-3384, 4830-4833, 8902-8923 and 8924. In another embodiment, the peptide of (hhh) has the sequence selected from the group consisting of SEQ ID NO: 1509-1514, 3495, 3714-3725, 4834-4845, 8925-8948 and 8949. In another embodiment, the peptide of (iii) has the sequence selected from the group consisting of SEQ ID NO: 1515-1518, 2873, 4846-4850, 8950-8965 and 8966. In another embodiment, the peptide of (jjj) has the sequence selected from the group consisting of SEQ ID NO: 176-179, 1519-1532, 2874-2878, 3385-3392 and 3393. In another embodiment, the peptide of (kkk) has the sequence selected from the group consisting of SEQ ID NO: 180-204, 1533-1589, 2879-2891, 3394-3410, 3496-3498, 3726-3731, 4851-4922, 8967-9147 and 9148. In another embodiment, the peptide of (lll) has the sequence selected from the group consisting of SEQ ID NO: 4923-4931, 9149-9181 and 9182. In another embodiment, the peptide of (mmm) has the sequence selected from the group consisting of SEQ ID NO: 1590-1591, 2892, 3732-3733, 4932-4937, 9183-9227 and 9228. In another embodiment, the peptide of (nnn) has the sequence selected from the group consisting of SEQ ID NO: 205-207, 1592-1795, 2893-2911, 3411-3426, 3734-3745, 4938-4959, 9229-9287 and 9288. In another embodiment, the peptide of (000) has the sequence selected from the group consisting of SEQ ID NO: 208, 1796-1804, 2912-2913, and 3427. In another embodiment, the peptide of (ppp) has the sequence selected from the group consisting of SEQ ID NO: 4960-4976, 9289-9389 and 9390. In another embodiment, the peptide of (qqq) has the sequence selected from the group consisting of SEQ ID NO: 1805, 3746-3749, 4977-4988, 9391-9416 and 9417. In another embodiment, the peptide of (rrr) has the sequence selected from the group consisting of SEQ ID NO: 209-341, 1806-2482, 2914-2943, 3428-3439, 4989-4990, 9418-9431 and 9432. In another embodiment, the peptide of (sss) has the sequence selected from the group consisting of SEQ ID NO: 342-349, 2483-2553, 2944-2948, 3440-3442, 4991-4997, 9433-9439 and 9440. In another embodiment, the peptide of (ttt) has the sequence selected from the group consisting of SEQ ID NO: 4998-4999, 9441-9458 and 9459. In another embodiment, the peptide of (uuu) has the sequence of SEQ ID NO:2554. In another embodiment, the peptide of (vvv) has the sequence selected from the group consisting of SEQ ID NO: 9471-9472, and 9489. In another embodiment, the peptide of (www) has the sequence selected from the group consisting of SEQ ID NO: 9460-9469 and 9470. In another embodiment, the peptide of (xxx) has the sequence selected from the group consisting of SEQ ID NO: 9479-9480, and 9483. In another embodiment, the peptide of (yyy) has the sequence of SEQ ID NO:9487. In another embodiment, the peptide of (zzz) has the sequence selected from the group consisting of SEQ ID NO: 9473-9474, and 9488. In another embodiment, the peptide of (aaaa) has the sequence selected from the group consisting of SEQ ID NO: 9475-9476, and 9486. In another embodiment, the peptide of (bbbb) has the sequence selected from the group consisting of SEQ ID NO: 9477-9478, and 9485. In another embodiment, the peptide of (cccc) has the sequence selected from the group consisting of SEQ ID NO: 9481-9482, and 9484. In another or further embodiment of any of the foregoing embodiments, the peptide fragment is fused to a delivery peptide. In a further embodiment, the delivery peptide comprises a targeting peptide. In yet a further embodiment, the peptide fragment further comprises a cell penetrating peptide (CPP). In another embodiment, the delivery peptide comprises a cell penetrating peptide (CPP). In a further embodiment, the CPP is linked to the N-terminus or C-terminus of the peptide fragment. In a further embodiment, the fusion construct further comprises a peptide linker between the CPP and the peptide fragment. The disclosure also provide a peptide as described in any of the foregoing embodiments, wherein the peptide is linked to a nanoparticle. The disclosure also provides a polynucleotide or oligonucleotide encoding a peptide fragment of as describe above and herein. The disclosure further provides a vector comprising the polynucleotide or oligonucleotide. The vector can be a viral vector such as an adenoviral, gammaviral or lentiviral vector. The disclosure also provides a recombinant cell comprising an oligonucleotide, polynucleotide or vector of the disclosure.

[0020] The disclosure also provides a method of treating a cancer in a subject, comprising administering a composition comprising any one or more of (a)-(uuu) (above), wherein a peptide (a)-(uuu) has a dominant-negative effect and inhibits cancer growth, invasiveness or migration. In one embodiment, the cancer is selected from the group consisting of: adrenocortical carcinoma, AIDS-related cancers, AIDS-related lymphoma, anal cancer, anorectal cancer, cancer of the anal canal, appendix cancer, childhood cerebellar astrocytoma, childhood cerebral astrocytoma, basal cell carcinoma, skin cancer (non-melanoma), biliary cancer, extrahepatic bile duct cancer, intrahepatic bile duct cancer, bladder cancer, urinary bladder cancer, bone and joint cancer, osteosarcoma and malignant fibrous histiocytoma, brain cancer, brain tumor, brain stem glioma, cerebellar astrocytoma, cerebral astrocytoma/malignant glioma, ependymoma, medulloblastoma, supratentorial primitive neuroectodermal tumors, visual pathway and hypothalamic glioma, breast cancer, including triple negative breast cancer, bronchial adenomas/carcinoids, carcinoid tumor, gastrointestinal, nervous system cancer, nervous system lymphoma, central nervous system cancer, central nervous system lymphoma, cervical cancer, childhood cancers, chronic lymphocytic leukemia, chronic myelogenous leukemia, chronic myeloproliferative disorders, colon cancer, colorectal cancer, cutaneous T-cell lymphoma, lymphoid neoplasm, mycosis fungoides, Seziary Syndrome, endometrial cancer, esophageal cancer, extracranial germ cell tumor, extragonadal germ cell tumor, extrahepatic bile duct cancer, eye cancer, intraocular melanoma, retinoblastoma, gallbladder cancer, gastric (stomach) cancer, gastrointestinal carcinoid tumor, gastrointestinal stromal tumor (GIST), germ cell tumor, ovarian germ cell tumor, gestational trophoblastic tumor glioma, head and neck cancer, hepatocellular (liver) cancer, Hodgkin lymphoma, hypopharyngeal cancer, intraocular melanoma, ocular cancer, islet cell tumors (endocrine pancreas), Kaposi Sarcoma, kidney cancer, renal cancer, laryngeal cancer, acute lymphoblastic leukemia, acute myeloid leukemia, chronic lymphocytic leukemia, chronic myelogenous leukemia, hairy cell leukemia, lip and oral cavity cancer, liver cancer, lung cancer, non-small cell lung cancer, small cell lung cancer, AIDS-related lymphoma, non-Hodgkin lymphoma, primary central nervous system lymphoma, Waldenstram macroglobulinemia, medulloblastoma, melanoma, intraocular (eye) melanoma, merkel cell carcinoma, mesothelioma malignant, mesothelioma, metastatic squamous neck cancer, mouth cancer, cancer of the tongue, multiple endocrine neoplasia syndrome, mycosis fungoides, myelodysplastic syndromes, myelodysplastic/myeloproliferative diseases, chronic myelogenous leukemia, acute myeloid leukemia, multiple myeloma, chronic myeloproliferative disorders, nasopharyngeal cancer, neuroblastoma, oral cancer, oral cavity cancer, oropharyngeal cancer, ovarian cancer, ovarian epithelial cancer, ovarian low malignant potential tumor, pancreatic cancer, islet cell pancreatic cancer, paranasal sinus and nasal cavity cancer, parathyroid cancer, penile cancer, pharyngeal cancer, pheochromocytoma, pineoblastoma and supratentorial primitive neuroectodermal tumors, pituitary tumor, plasma cell neoplasm/multiple myeloma, pleuropulmonary blastoma, prostate cancer, rectal cancer, renal pelvis and ureter, transitional cell cancer, retinoblastoma, rhabdomyosarcoma, salivary gland cancer, ewing family of sarcoma tumors, soft tissue sarcoma, uterine cancer, uterine sarcoma, skin cancer (non-melanoma), skin cancer (melanoma), papillomas, actinic keratosis and keratoacanthomas, merkel cell skin carcinoma, small intestine cancer, soft tissue sarcoma, squamous cell carcinoma, stomach (gastric) cancer, supratentorial primitive neuroectodermal tumors, testicular cancer, throat cancer, thymoma, thymoma and thymic carcinoma, thyroid cancer, transitional cell cancer of the renal pelvis and ureter and other urinary organs, gestational trophoblastic tumor, urethral cancer, endometrial uterine cancer, uterine sarcoma, uterine corpus cancer, vaginal cancer, vulvar cancer, and Wilm's Tumor.

[0021] The disclosure also provides a method of treating an infection by a betacoronavirus, the method comprising administering a composition of of any one or more of (vvv)-(cccc), wherein the composition inhibits the binding of a betacoronavirus to a receptor-ligand on a human cell.

[0022] The disclosure also provides a screening method to identify one or more peptide sequences that modulate functional regions of target protein(s), comprising: synthesizing a library of overlapping gene fragments from one or more genes that express the target protein(s), wherein each gene fragment has a unique nucleotide sequence, wherein each gene fragment from the same gene that express a target protein has a sequence which partial overlaps with the sequences of least two or more gene fragments having nucleotide sequences from the same gene; pooling and cloning the gene fragments into vectors, wherein each vector overexpresses one gene fragment when transduced or transfected into a cell; transfecting or transducing cells with the vectors comprising gene fragments, wherein each transduced or transfected cell has only one vector that comprises a gene fragment; screening the transfected or transduced cells for a phenotypic characteristic associated with target protein activity; sequencing and quantifying gene fragment abundance from cells exhibiting the phenotypic characteristic; and mapping the sequenced gene fragments back to the gene that express the target protein and providing a modulation score for each codon, wherein the modulation score is defined as the mean depletion/enrichment of all overlapping sequenced gene fragments, and wherein codons of the gene fragments which have a modulation score above or below a p=0.05 significance threshold, indicates peptide sequences which modulate functional regions of the target proteins. In one embodiment, the library of overlapping gene fragments is synthesized using pooled DNA oligonucleotide synthesis on a solid substrate. In another or further embodiment, the gene fragments are 60 nucleotides to 300 nucleotides in length. In another embodiment, the gene fragments are 120 nucleotides in length. In another embodiment, the target protein(s) are associated with a disease of disorder. In another embodiment, the disease or disorder is cancer, Alzheimer's disease or a neurodegenerative tauopathy disorder. In another embodiment, the genes expressing target proteins are tumor suppressor genes, pro-apoptotic genes or oncogenes. In another embodiment, the vectors are viral vectors. In another embodiment, the viral vectors are recombinant retroviral vectors, adenoviral vectors, adeno-associated viral vectors, alphaviral vectors, or lentiviral vectors. In another embodiment, the viral vectors are lentiviral vectors. In another embodiment, the phenotypic characteristic is cell growth. In another embodiment, the phenotypic characteristic is immunostimulatory/immunosuppressive activity. In another embodiment, the phenotypic characteristic is neurodegenerative tauopathy. In another embodiment, the modulation score is a depletion score indicating that the identified peptides inhibit or suppress the functional activity of target proteins. In another embodiment, the modulation score is an enrichment score indicating that the identified peptides enhance the functional activity of target proteins.

[0023] The disclosure also provides a screening method to identify one or more peptide sequences that inhibit functional regions of target protein(s) expressed by oncogenes, comprising: synthesizing a library of overlapping gene fragments from one or more oncogenes that express the target protein(s), wherein each gene fragment has a unique nucleotide sequence, wherein each gene fragment from the same gene that express a target protein has a sequence which partial overlaps with the sequences of least two or more gene fragments having nucleotide sequences from the same gene; pooling and cloning the gene fragments into vectors, wherein each vector overexpresses one gene fragment when transduced or transfected into a cell; transfecting or transducing cells with the vectors comprising gene fragments, wherein each transduced or transfected cell has only one vector that comprises a gene fragment; screening the transfected or transduced cells for cell growth over various time points; sequencing and quantifying gene fragment abundance from each of the time points; and mapping the sequenced gene fragments back to the oncogene that express the target protein and providing a depletion score for each codon, wherein the depletion score is defined as the mean depletion/enrichment of all overlapping sequenced gene fragments, and wherein codons of the gene fragments which have a depletion score below a p=0.05 significance threshold, indicates peptide sequences which inhibit functional regions of the target proteins expressed by the oncogenes. In another embodiment, the library of overlapping gene fragments is synthesized using pooled DNA oligonucleotide synthesis on a solid substrate. In another embodiment, the gene fragments are 60 nucleotides to 300 nucleotides in length. In another embodiment, the gene fragments are 120 nucleotides in length. In another embodiment, the vectors are viral vectors. In another embodiment, the viral vectors are recombinant retroviral vectors, adenoviral vectors, adeno-associated viral vectors, alphaviral vectors, or lentiviral vectors. In another embodiment, the viral vectors are lentiviral vectors. In another embodiment, the oncogenes includes one or more oncogenes selected from MCL-1, BCR, BRAF, JAK1, JAK2, VEGF, EGFR, ALK, CDK1, CDK2, CDK3, CDK3, CDK4, BRCA, PIK3CA, MEK, C-KIT, NRAS, ABCB11, ANTXR2, BCOR, CDKN1B, CYP27A1, EMD, FANCF, ABCC8, APC, BCORL1, CDKN2A, CYP27B1, EP300, FANCG, ABCC9, AR, BLM, CEP290, DAXX, EPCAM, FANCI, ABCD1, ARID1A, BMPR1A, CFTR, DBT, EPHAS, FANCL, ABL1, ARID2, RAF1, CHEK1, DCC, EPHB2, FANCM, ACADM, ARSA, BRCA1, CHEK2, DCX, ERBB2, FAS, CADS, ASAH1, BRCA2, CHM, DDB2, ERBB3, FAT3, ACADVL, ASCC1, BRIP1, CIC, DDR2, ERBB4, FBXO11, ACTC1, ASL, BTD, CLN3, DES, ERCC2, FBXO32, ACTN2, ASPA, BTK, CLNS, DHCR7, ERCC3, FBXW7, ACVR1B, ASS1, BUB1B, CLN6, DICER1, ERCC4, FGD4, ADA, ASXL1, CALR3, CLN8, DIS3L2, ERCCS, FGFR1, ADAMTS13, ATM, CARD11, COL1A2, DKC1, ERCC6, FGFR2, ADAMTS2, ATP4A, CASP8, COL4A3, DLD, ERRFI1, FGFR3, AGA, ATP6V0D2, CAV3, COL4A4, DMD, ESCO2, FH, AGL, ATP7A, CBFB, COL7A1, DNAJB2, ESR1, FKTN, AGPS, ATP7B, CBL, COX15, DNMT3A, ETV6, FLCN, AHI1, ATP8B1, CBLB, CREBBP, DSC2, EXOC2, FLT3, AIP, ATR, CBLC, CRLF2, DSE, EXT1, FMR1, AKAP9, ATRX, CBS, CRTAP, DSC2, EXT2, FUBP1, AKT1, AXIN1, CCDC178, CRYAB, DSP, EYA4, FZD3, AKT2, AXIN2, CCNE1, CSF1R, DTNA, EZH2, G6PC, ALB, BAG3, CD79A, CSMD3, ECT2L, F11, GAA, ALDH3A2, BAI3, CD79B, CSRP3, EDA, F5, GABRA6, ALDOB, BAP1, CD96, CTNNB1, EDN3, FAH, GALNT12, ALK, BARD1, CDC27, CTNS, EDNRB, FAM46C, GALT, ALS2, BAX, CDC73, CTSK, EED, FANCA, GATA1, AMER1, BAZ2B, CDH1, CUBN, EGFR, FANCB, GATA2, AMPD1, BCKDHA, CDH23, CYLD, EGR2, FANCC, GATA3, AMPH, BCKDHB, CDK12, CYP11A1, EHBP1, FANCD2, GATAD1, ANTXR1, BCL6, CDK4, CYP21A2, ELMO1, FANCE, GBA, GCDH, JAK1, MDM2, NEK2, PLOD1, ROS1, SMPD1, GJB2, JAK2, MECP2, NEXN, PLP1, RPGRIP1L, SOX10, GLA, JAK3, MED12, NF1, PMP22, RS1, SOX2, GLB1, JUP, MEFV, NF2, PMS2, RSPO1, SPEG, GLI1, KAT6A, MEN1, NFE2L2, POLD1, RTEL1, SPOP, GLI3, KCNQ1, MET, NFKBIA, POLE, RUNX1, SRC, GLMN, KDM4B, MFSD8, NIPA2, POLH, RUNX1T1, SSTR1, GNA11, KDM6A, MIER3, NKX3-1, POMGNT1, RYR2, STAG2, GNAQ, KDR, MITF, NOTCH1, POMT1, S1PR2, STAR, GNAS, KEAP1, MKS1, NOTCH2, POU1F1, SAMD9L, STK11, GNPTAB, KIF1B, MLH1, NPC1, POU6F2, SBDS, SUFU, GPC3, KIT, MLH3, NPC2, PPM1L, SCN11A, SUZ12, GPC6, KLF6, MMAB, NPHP1, PPP2R1A, SCN5A, SYNE3, GPR78, KLHDC8B, MPL, NPHP4, PPT1, SCNN1A, TAZ, GRIN2A, KMT2A, MPZ, NPM1, PRDM1, SCNN1B, TBX20, GRM8, KMT2C, MRE11A, PRKAG2, SCNN1G, TCAP, GXYLT1, KMT2D, MSH2, NRCAM, PRKAR1A, SCO2, TCERG1, H3F3A, KRAS, MSH3, NTRK1, PRKDC, SDHA, TCF7L2, HADHA, KREMEN1, MSH6, NUP62, PROC, SDHAF2, TERT, HADHB, L1CAM, MSMB, OR5L1, PROP1, SDHB, TET2, HBB, LAMA2, MSR1, OTC, PRPF40B, SDHC, TFG, HESX1, LAMA4, MTAP, OTOP1, PRX, SDHD, TGFB3, HEXA, LAMP2, MTHFR, PAH, PSAP, SEPT9, TGFBR1, HEXB, LDB3, MTM1, PALB2, PSEN1, SETBP1, TGFBR2, HFE, LEPRE1, MTOR, PALLD, PSEN2, SETD2, THSD7B, HGSNAT, LIG4, MUC16, PAX5, PTCH1, SF1, TINF2, HIST1H3B, LMNA, MUT, PAX6, PTCH2, SF3A1, TMC6, HNF1A, LPAR2, MUTYH, PBRM1, PTEN, SF3B1, TMC8, HRAS, LRP1B, MYBPC3, PCDH15, PTGFR, SGCD, TMEM127, HSPH1, LRPPRC, MYC, PCGF2, PTPN11, SGSH, TMEM43, IDH1, LRRK2, MYD88, PDE11A, PTPN12, SH2B3, TMEM67, IDH2, LYST, MYH6, PDGFRA, RAC1, SLC25A4, TMPO, IGF2R, MAP2K1, MYH7, PDHA1, RAD21, SLC26A2, TNFAIP3, IGHMBP2, MAP2K2, MYL2, PDZRN3, RAD50, SLC37A4, TNFRSF14, IGSF10, MAP2K4, MYL3, PEX1, RAD51B, SLC7A8, TNNC1, IKBKAP, MAP3K1, MYLK2, PEX7, RAD51C, SLC9A9, TNNI3, IKZF1, MAP4K3, MYO1B, PHF6, RAD51D, SLX4, TNNT1, IKZF4, MAP7, MYO7A, PIK3CA, RARB, SMAD2, TNNT2, IL2RG, MAPK10, MYOZ2, PIK3CG, RB1, SMAD4, TP53, IL6ST, MAS1L, MYPN, PIK3R1, RBM20, SMARCA4, TPM1, IL7R, MAX, NBN, PKHD1, RECQL4, SMARCB1, TPP1, INVS, MC1R, NCOA2, PKP2, RET, SMC1A, TRAF5, IRAK4, MCCC2, NCOR1, PLEKHG5, RHBDF2, SMC3, TRIO, ITCH, MCOLN1, NDUFA13, PLN, RNASEL, SMO, TRPV4, TRRAP, U2AF1, USH1C, WAS, WWP1, ZIC3, TSC1, U2AF2, USH1G, WBSCR17, XPA, ZNF2, TSC2, UBA1, USP16, WEE1, XPC, ZNF226, TSHB, UBR3, USP25, WNK2, XRCC3, ZNF473, TSHR, UROD, VCL, WRN, ZBED4, ZNF595, TTN, UROS, VHL, WT1, ZFHX3, HER2, and ZRSR2. In another embodiment, the one or more oncogenes are selected from KRAS, HRAS, NRAS, RAF1, BRAF, ARAF, Myc, Max, FBXW7, and EGFR. The disclosure also provides a peptide comprising a sequence that inhibits functional regions of target protein(s) expressed by oncogenes identified by the method of the disclosure. In another embodiment, the peptide inhibits the functional regions of EGFR and has the sequence of EGFR-697 or inhibits the function regions of RAF1 and has the sequence of RAF1-73.

[0024] The disclosure also provides an isolated polypeptide or peptide comprising, consisting essentially of or consisting of a sequence that is 85%, 87%, 90%, 92%, 94%, 95%, 98%, 99% or 100% identical to any one sequence as set forth SEQ ID NOs: 1-9489. In another embodiment, the peptide inhibits cancer cell growth, invasion, metastasis, and/or migration or inhibits the ability of a betacoronavirus to infect a cell. In another embodiment, the peptide further comprises a cell penetrating peptide (CPP) linked to the N-terminus or C-terminus of the isolated polypeptide or peptide. In another embodiment, the construct comprises a peptide linker between the CPP and the polypeptide or peptide. In still another embodiment, a nanoparticle can be linked to a polypeptide or peptide of the disclosure.

### DESCRIPTION OF DRAWINGS

[0025] FIG. 1A-C shows an overview of experimental design and initial results: (A) Design of overlapping gene fragment library. Gene fragments coding for all possible overlapping 40 mer peptides were computed from target gene cDNA sequences. Gene fragment sequences were then generated via chip-based oligonucleotide synthesis and cloned into a lentiviral plasmid vector. This plasmid library was in turn used to generate lentiviral particles via transient transfection. The lentiviral particles were then used to infect target mammalian cell lines at a low MOI to ensure only one gene fragment was expressed per cell. The cells were then grown for two weeks, with genomic DNA extracted at day 3 and day 14. Next, gene fragments were PCR amplified from genomic DNA and sequenced to track fragment abundances and calculate log₂ enrichment and depletion. Gene fragments were mapped back to target gene coding sequences, and each codon/amino acid was given a fitness score defined as the Z-normalized mean loge fold change of all overlapping gene fragments. (B) Resulting amino acid level fitness scores. Screening data from Hs578T and MDA-MB-231 cells shows conserved regions of fitness dependencies, as well as cell line specific fitness dependencies. The heatmap shows the fitness score for each amino acid position (sorted in ascending order from top to bottom) across all proteins assayed in the screen. On the right, plots showing the statistical likelihood of depletion are shown for RAF1, EGFR, BRAF, and FBXW7. Peptides overlapping amino acid positions with known functional roles are significantly depleted over the course of cell growth. (C) The fitness effects of peptides derived from known pathogenic and dominant negative Ras mutants. KRASQ61K is significantly depleted in both cell lines, while HRAS S17N is depleted only in HRAS mutant Hs578T cells.

[0026] FIG. 2A-F shows gene fragment screening identifies motifs which function as inhibitors of cancer cell proliferation: (A) Plot of individual peptide enrichment/depletion for expanded screen. Peptides are centered around zero depletion, with a subpopulation being significantly deleterious to cells when overexpressed genetically. Peptides with loge fold change values less than −4.5 are labeled. Cancer driver genes were hand curated, with additional controls added from the pilot screen. (B) Plot of individual peptide enrichment/depletion for mutant screen. 579 mutant cancer drivers covering 53 driver genes were assayed for growth inhibition as in (A). Peptides are centered around zero depletion, with a subpopulation being significantly deleterious to cells when overexpressed genetically. Peptides with loge fold change values less than −7 are labeled. (C) Per position fitness scores for NFE2L2, MDM2, and PIK3CA. Select known PPIs are annotated on the plots, corresponding to regions of significant depletion. (D) Network of potential interactions among cancer drivers in this gene set. Interaction data is sourced from STRING, with fitness data from DepMap CRISPR screening overlaid. Nodes colored in light gray are essential for cell fitness, while nodes colored in dark gray are non-essential or have increased growth rates upon knockout. Arrows highlighting potential disruption of oncogenic PPIs. Gray nodes indicate genes for which high confidence CRISPR based fitness data was not available. (E) Fitness scores for mutant residues derived from KRAS. Functional regions sourced from UniProt are overlaid above WT fitness. Dots indicate mutant amino acid fitness scores which were significantly depleted during the pooled screen (F) Comparison of mutant fitness scores derived from peptide screening data, with fitness scores derived from deep mutational scan data in a TP53 null cell line. After filtering out TP53 mutants with little effect on cell fitness in the deep mutational scan (absolute fitness scores <0.5), inferred TP53 functionality is significantly correlated with mutant peptide derived fitness (Pearson, P=0.045), supporting the hypothesis that peptide screening can be used to identify functionally important residues in the context of cancer cell fitness.

[0027] FIG. 3A-D shows validation of anti-proliferative peptides confirms target specific functionality: (A) In vitro arrayed validation of lentivirus delivered gene fragments derived from WT proteins. Peptides predicted to be deleterious to cell growth (by depletion in pooled screen) significantly inhibited proliferation relative to GFP control. Cell proliferation was measured via the WST-8 assay after one week of growth following lentiviral transduction. Bar plots indicate mean, with error bars representing standard error (*P<0.05,**P<0.01,***P<0.001,****P<0.0001). Each panel represents a separately conducted experiment (hence the two MDA-MB-231 panels). (B) Validation with chemically synthesized peptides (n=4). Chemically synthesized EGFR-697 and RAF1-73 conjugated to a cell penetrating TAT protein transduction motif were added to cells at 0-100 μM. A 3× FLAG Peptide conjugated to TAT served as the negative control. Cell viability was measured 24 hours later by the WST-8 assay, indicating EGFR-697 and RAF1-73 function effectively in vitro to inhibit the growth of Hs578T and MDA-MB-231 cells in a dose dependent manner. Dotted lines indicate 95% confidence intervals for nonlinear fit. (C) Peptide mechanism explored via co-immunoprecipitation. 3×-Flag tagged RAF1-73 derived from the Ras binding domain of RAF1 pulls down activated Ras when immunoprecipitated, indicating retention of WT domain biological functionality. (D) Results of RNA-sequencing on EGFR-697 expressing Hs578T cells. EGFR-697 overexpression results in significant growth arrest, and differential expression of 225 genes, as well as significant downregulation of pathways relevant to cellular proliferation. Additional GSEA analysis revealed a transcriptional phenotype consistent with EGFR inhibition. Gene set “KOBAYASHI_EGFR_SIGNALING_24HRS_DN” is a gene set composed of genes downregulated upon treatment with an irreversible EGFR inhibitor in H1975 cells. Treatment with EGFR-697 peptide results in significant downregulation of this gene set in Hs578T cells. The “KOBAYASHI EGFR SIGNALING 24HRS UP” is a gene set from the same experiment highlighting genes which are upregulated upon EGFR inhibition. This gene set is significantly upregulated upon EGFR-697 overexpression.

[0028] FIG. 4A-E shows PepTile based mapping of Betacoronavirus spike protein and host receptor interactions, and facilitating of downstream peptide bioproduction: (A) Schematic illustrating experimental strategy to probe human receptors for Betacoronavirus binding domains. Peptides derived from receptors (plus homologs) implicated in coronavirus cell entry were expressed on the cell surface, and screened for binding mouse Fc tagged full length coronavirus spike proteins, as well as mouse Fc tagged RBD domains. Enrichment of cells expressing binding peptides was accomplished via magnetic activated cell sorting after incubation with anti-mouse Fc magnetic beads. (B) Fluorescent images showing cell surface localization of HaloTag construct cloned into cell surface expression vector. HEK293T cells were transfected with the cell surface HaloTag construct, and subsequently incubated with AlexaFluor488 labeled HaloTag ligand to visualize protein localization. (C) Plot showing consensus peptides enriched in the bound fraction for both the full-length spike protein as well as the RBD domain. Highly enriched ACE2 derived peptides are highlighted. (D) Hit peptides derived from ACE2 are shown overlaid on the protein crystal structure in complex with SARS-Cov2 spike protein. Shown is ACE2_28; ACE2_72; ACE2_314/ACE2_315, ACE2_654/655; ACE2_591; ACE2_418; ACE2_452. (E) Peptide production protocol to facilitate translation of peptide hits. Tagless peptides conjugated to cell penetrating protein TAT were produced at high purity via fusion to Maltose Binding Protein (MBP), and subsequent cleavage by TEV protease. The protocol makes use of no specialized instruments, and is easily adaptable to alternative cell penetrating motifs or peptide constructs. Ladder has bands marking 10, 15, 20, 25, 37, 50, 75, 100, 150, and 250 kD.

[0029] FIG. 5A-E shows a cloning strategy and pilot screen overall analyses: (A) Overview of library construction. Library was ordered as single stranded DNA oligos from Custom Array, and subsequently amplified via PCR to generate gene fragment libraries compatible with Gibson assembly cloning. This library was then cloned into pEPIP, with library coverage determined via high throughput sequencing. (B-C) Initial analysis for pooled pilot screen in Hs578T and MDA-MB-231 cells. The majority of peptides tested did not drop out during the fitness screen, although the distribution of peptide log fold change values is skewed towards depletion rather than enrichment. (D-E) The computed fitness scores for the amino acid positions showed good correlation between replicates in both Hs578T and MDA-MB-231. (r=0.536 and r=0.753 respectively). The majority of amino acid positions scored have no significant depletion, with a small subset having a detectable impact on fitness.

[0030] FIG. 6A-G shows overall analyses and extended metrics for expanded cancer driver screens: (A) Table detailing all the peptides assayed in the expanded wildtype driver screen. Genes comprising diverse cancer associated signaling pathways and processes. (B) Computed per position amino acid scores had good correlation between replicates (Pearson=0.917), with reproducibility exceeding that of the pilot screen. It was hypothesized the greater effect size of deleterious peptides contained in the larger library (see FIG. 2A) likely drives improved signal to noise ratio. As in the pilot screen the majority of amino acid positions in the full-length protein structures are not implicated in cell fitness, consistent with accepted understanding that protein-protein interactions directly driving oncogenic proliferation are rare. (C) The fitness score for the most deleterious residue in each full-length protein is plotted for each gene. GFP and HPRT1 controls show little effect on cell fitness across protein structure. (D) Per position fitness scores for RASA1, RRAS2, FLT3, DICER1, RB1, and ERBB4. Select PPIs are annotated on the plots, corresponding to regions of significant depletion. (E) Replicate correlation for mutant peptide screen. Screen shows high degree of reproducibility (Pearson correlation=0.859). As in the previously presented screens, the majority of mutant amino acid motifs assayed have no effect on cell fitness. (F) Table detailing all the peptides assayed in the mutant screen. Mutant genes cover a wide range of signaling pathways and molecular functions. (G) Plot of wild type (gray bars) and mutant amino acid fitness scores (points) for PIK3CA, BRAF, and SMAD4. Points labeled in red were significantly (BH adjusted P value <0.05) depleted in the pooled screen.

[0031] FIG. 7A-E shows individual validations of antiproliferative peptides: (A-B) Plots showing the correlation between peptide depletion versus charge and hydrophobicity. There is little correlation between charge/hydrophobicity and peptide log fold change, indicating that gross physiochemical factors do not mediate peptide effects on fitness. (C) Growth kinetics in Hs578T for individual peptide variants shown in FIG. 3A. Cell growth was quantified via the WST-8 proliferation assay. Results are from the same experiment split into multiple plots for ease of visualization, hence identical GFP controls for each peptide group. Arrayed validation of lentivirally delivered gene fragments derived from KRAS mutants is also shown. KRAS61K mutant peptides predicted to be deleterious to cell growth significantly inhibited growth (P<0.05, as measured at the 7 day time point). (D) Growth kinetics in MDA-MB-231 for individual peptide variants shown in FIG. 3A. Cell growth was quantified via the WST-8 proliferation assay. Results are from the same experiment split into multiple plots for ease of visualization, hence identical GFP controls for each peptide group. Arrayed validation of lentivirally delivered gene fragments derived from KRAS mutants is also shown. KRAS61K mutant peptides predicted to be deleterious to cell growth significantly inhibited growth (P<0.05, as measured at the 7 day time point). (E) Validation of peptide expression via immunofluorescence. Peptides were transduced with lentivirus 72 hours before immunostaining and imaging.

[0032] FIG. 8A-C shows Betacoronavirus peptide library cloning strategy and computational validation: (A) Cloning strategy and vector design for cell surface PepTile. Gene fragment libraries were synthesized as single stranded oligonucleotides and converted to double stranded DNA via PCR. This library was then cloned into a cell surface expression vector via Gibson Assembly. Cell surface expression was obtained by cloning the gene fragment library between an N-terminal Ig Kappa leader peptide (to ensure secretion), and the PDGFR transmembrane domain (to provide anchoring on the cell membrane). (B) Genes from which peptide library was derived. Genes were chosen based on involvement in SARS-CoV-2, SARS-CoV, and/or MERS-CoV cell entry. (C) Structural justification for ACE2 peptide inhibition: X-ray crystallography and Cryo-EM structures of SARS-CoV2 spike protein receptor binding domain (RBD) complexed with ACE2 reveal that the binding interface stretches along two antiparallel alpha helices in the N-terminal domain of the protein (PDB structures 6M17, 6LZG, and 6M0J)86-88. As specific examples, peptides covering each of these two helices and homologous ones from related proteins are shown sequentially below the structures.

### DETAILED DESCRIPTION

[0033] As used herein and in the appended claims, the singular forms “a,” “an,” and “the” include plural referents unless the context clearly dictates otherwise. Thus, for example, reference to “a cell” includes a plurality of such cells and reference to “the fragment” includes reference to one or more fragments and equivalents thereof known to those skilled in the art, and so forth.

[0034] Also, the use of “or” means “and/or” unless stated otherwise. Similarly, “comprise,” “comprises,” “comprising” “include,” “includes,” and “including” are interchangeable and not intended to be limiting.

[0035] It is to be further understood that where descriptions of various embodiments use the term “comprising,” those skilled in the art would understand that in some specific instances, an embodiment can be alternatively described using language “consisting essentially of” or “consisting of.”

[0036] Unless defined otherwise, all technical and scientific terms used herein have the same meaning as commonly understood to one of ordinary skill in the art to which this disclosure belongs. Although many methods and reagents are similar or equivalent to those described herein, the exemplary methods and materials are disclosed herein.

[0037] All publications mentioned herein are incorporated herein by reference in full for the purpose of describing and disclosing the methodologies, which might be used in connection with the description herein. Moreover, with respect to any term that is presented in one or more publications that is similar to, or identical with, a term that has been expressly defined in this disclosure, the definition of the term as expressly provided in this disclosure will control in all respects.

[0038] It should be understood that this disclosure is not limited to the particular methodology, protocols, and reagents, etc., described herein and as such may vary. The terminology used herein is for the purpose of describing particular embodiments or aspects only and is not intended to limit the scope of the present disclosure.

[0039] Other than in the operating examples, or where otherwise indicated, all numbers expressing quantities of ingredients or reaction conditions used herein should be understood as modified in all instances by the term “about.” The term “about” when used to described the present invention, in connection with percentages means ±1%. The term “about,” as used herein can mean within an acceptable error range for the particular value as determined by one of ordinary skill in the art, which can depend in part on how the value is measured or determined, e.g., the limitations of the measurement system. Alternatively, “about” can mean a range of plus or minus 20%, plus or minus 10%, plus or minus 5%, or plus or minus 1% of a given value. Alternatively, particularly with respect to biological systems or processes, the term can mean within an order of magnitude, within 5-fold, or within 2-fold, of a value. Where particular values are described in the application and claims, unless otherwise stated the term “about” meaning within an acceptable error range for the particular value can be assumed. Also, where ranges and/or subranges of values are provided, the ranges and/or subranges can include the endpoints of the ranges and/or subranges. In some cases, variations can include an amount or concentration of 20%, 10%, 5%, 1%, 0.5%, or even 0.1% of the specified amount.

[0040] For the recitation of numeric ranges herein, each intervening number there between with the same degree of precision is explicitly contemplated. For example, for the range of 6-9, the numbers 7 and 8 are contemplated in addition to 6 and 9, and for the range 6.0-7.0, the number 6.0, 6.1, 6.2, 6.3, 6.4, 6.5, 6.6, 6.7, 6.8, 6.9, and 7.0 are explicitly contemplated.

[0041] The term “amino acid” refers to naturally occurring and synthetic amino acids, as well as amino acid analogs and amino acid mimetics that function in a manner similar to the naturally occurring amino acids. Naturally occurring amino acids are those encoded by the genetic code, as well as those amino acids that are later modified, e.g., hydroxyproline, γ-carboxyglutamate, and o-phosphoserine. In some embodiments, an amino acid analogs refers to compounds that have the same basic chemical structure as a naturally occurring amino acid, i.e., a carbon that is bound to a hydrogen, a carboxyl group, an amino group, and an R group, e.g., homoserine, norleucine, methionine sulfoxide, methionine methyl sulfonium. Such analogs have modified R groups (e.g., norleucine) or modified peptide backbones, but retain the same basic chemical structure as a naturally occurring amino acid. In some embodiments, an amino acid mimetics refers to chemical compounds that have a structure that is different from the general chemical structure of an amino acid, but that functions in a manner similar to a naturally occurring amino acid. The terms “non-naturally occurring amino acid” and “unnatural amino acid” refer to amino acid analogs, synthetic amino acids, and amino acid mimetics which are not found in nature. In certain instances one or more D-amino acids can be used in various peptide compositions of the disclosure. The disclosure provides various peptides that are useful for treating various diseases and infections. These peptides can comprise naturally occurring amino acid. In other embodiments, the peptides can comprise non-natural amino acids. The use of non-natural amino acids can improve the peptides stability, decrease degradation and/or improve biological activity. For example, in some embodiments, one or more D-amino acids. In other embodiments, retroinverso peptides are contemplated using various amino acid configurations.

[0042] Amino acids may be referred to herein by either their commonly known three letter symbols or by the one-letter symbols recommended by the IUPAC-IUB Biochemical Nomenclature Commission. Nucleotides, likewise, may be referred to by their commonly accepted single-letter codes.

[0043] For purposes of the disclosure the term “cancer” will be used to encompass cell proliferative disorders, neoplasms, precancerous cell disorders and cancers, unless specifically delineated otherwise. Thus, a “cancer” refers to any cell that undergoes aberrant cell proliferation that can lead to metastasis or tumor growth. Exemplary cancers include but are not limited to, adrenocortical carcinoma, AIDS-related cancers, AIDS-related lymphoma, anal cancer, anorectal cancer, cancer of the anal canal, appendix cancer, childhood cerebellar astrocytoma, childhood cerebral astrocytoma, basal cell carcinoma, skin cancer (non-melanoma), biliary cancer, extrahepatic bile duct cancer, intrahepatic bile duct cancer, bladder cancer, urinary bladder cancer, bone and joint cancer, osteosarcoma and malignant fibrous histiocytoma, brain cancer, brain tumor, brain stem glioma, cerebellar astrocytoma, cerebral astrocytoma/malignant glioma, ependymoma, medulloblastoma, supratentorial primitive neuroectodermal tumors, visual pathway and hypothalamic glioma, breast cancer, including triple negative breast cancer, bronchial adenomas/carcinoids, carcinoid tumor, gastrointestinal, nervous system cancer, nervous system lymphoma, central nervous system cancer, central nervous system lymphoma, cervical cancer, childhood cancers, chronic lymphocytic leukemia, chronic myelogenous leukemia, chronic myeloproliferative disorders, colon cancer, colorectal cancer, cutaneous T-cell lymphoma, lymphoid neoplasm, mycosis fungoides, Seziary Syndrome, endometrial cancer, esophageal cancer, extracranial germ cell tumor, extragonadal germ cell tumor, extrahepatic bile duct cancer, eye cancer, intraocular melanoma, retinoblastoma, gallbladder cancer, gastric (stomach) cancer, gastrointestinal carcinoid tumor, gastrointestinal stromal tumor (GIST), germ cell tumor, ovarian germ cell tumor, gestational trophoblastic tumor glioma, head and neck cancer, hepatocellular (liver) cancer, Hodgkin lymphoma, hypopharyngeal cancer, intraocular melanoma, ocular cancer, islet cell tumors (endocrine pancreas), Kaposi Sarcoma, kidney cancer, renal cancer, laryngeal cancer, acute lymphoblastic leukemia, acute myeloid leukemia, chronic lymphocytic leukemia, chronic myelogenous leukemia, hairy cell leukemia, lip and oral cavity cancer, liver cancer, lung cancer, non-small cell lung cancer, small cell lung cancer, AIDS-related lymphoma, non-Hodgkin lymphoma, primary central nervous system lymphoma, Waldenstram macroglobulinemia, medulloblastoma, melanoma, intraocular (eye) melanoma, merkel cell carcinoma, mesothelioma malignant, mesothelioma, metastatic squamous neck cancer, mouth cancer, cancer of the tongue, multiple endocrine neoplasia syndrome, mycosis fungoides, myelodysplastic syndromes, myelodysplastic/myeloproliferative diseases, chronic myelogenous leukemia, acute myeloid leukemia, multiple myeloma, chronic myeloproliferative disorders, nasopharyngeal cancer, neuroblastoma, oral cancer, oral cavity cancer, oropharyngeal cancer, ovarian cancer, ovarian epithelial cancer, ovarian low malignant potential tumor, pancreatic cancer, islet cell pancreatic cancer, paranasal sinus and nasal cavity cancer, parathyroid cancer, penile cancer, pharyngeal cancer, pheochromocytoma, pineoblastoma and supratentorial primitive neuroectodermal tumors, pituitary tumor, plasma cell neoplasm/multiple myeloma, pleuropulmonary blastoma, prostate cancer, rectal cancer, renal pelvis and ureter, transitional cell cancer, retinoblastoma, rhabdomyosarcoma, salivary gland cancer, ewing family of sarcoma tumors, soft tissue sarcoma, uterine cancer, uterine sarcoma, skin cancer (non-melanoma), skin cancer (melanoma), papillomas, actinic keratosis and keratoacanthomas, merkel cell skin carcinoma, small intestine cancer, soft tissue sarcoma, squamous cell carcinoma, stomach (gastric) cancer, supratentorial primitive neuroectodermal tumors, testicular cancer, throat cancer, thymoma, thymoma and thymic carcinoma, thyroid cancer, transitional cell cancer of the renal pelvis and ureter and other urinary organs, gestational trophoblastic tumor, urethral cancer, endometrial uterine cancer, uterine sarcoma, uterine corpus cancer, vaginal cancer, vulvar cancer, and Wilm's Tumor. In a particular embodiment, the cancer can be selected from the group consisting of melanoma, colorectal cancer, pancreatic cancer, bladder cancer, breast cancer, triple negative breast cancer, ovarian cancer and lung cancer.

[0044] “Cells” according to the disclosure include any cell into which foreign gene fragments can be introduced and expressed as described herein or into which a drug-like peptide of the disclosure can be delivered. It is to be understood that the basic concepts of the disclosure described herein are not limited by cell type. Foreign gene fragments (i.e., those which are not part of a cell's natural nucleic acid composition) may be introduced into a cell using any method known to those skilled in the art for such introduction. Such methods include transfection, transduction, infection (e.g., viral transduction), injection, microinjection, gene gun, nucleofection, nanoparticle bombardment, transformation, conjugation, by application of the nucleic acid in a gel, oil, or cream, by electroporation, using lipid-based transfection reagents, or by any other suitable transfection method. One of skill in the art will readily understand and adapt such methods using readily identifiable literature sources.

[0045] The term “contacting” can mean direct or indirect binding or interaction between two or more entities. An example of direct interaction is binding. An example of an indirect interaction is where one entity acts upon an intermediary molecule, which in turn acts upon the second referenced entity. Contacting as used herein includes in solution, in solid phase, in vitro, ex vivo, in a cell and in vivo. Contacting in vivo can be referred to as administering, or administration.

[0046] As used herein, the term “detectable marker” or “selectable marker” can refer to at least one marker capable of directly or indirectly, producing a detectable signal. A non-exhaustive list of this marker includes enzymes which produce a detectable signal, for example by colorimetry, fluorescence, luminescence, such as horseradish peroxidase, alkaline phosphatase, β-galactosidase, glucose-6-phosphate dehydrogenase, chromophores such as fluorescent, luminescent dyes, groups with electron density detected by electron microscopy or by their electrical property such as conductivity, amperometry, voltammetry, impedance, detectable groups, for example whose molecules are of sufficient size to induce detectable modifications in their physical and/or chemical properties, such detection can be accomplished by optical methods such as diffraction, surface plasmon resonance, surface variation, the contact angle change or physical methods such as atomic force spectroscopy, tunnel effect, or radioactive molecules such as 32 P, 35 S or 125 I.

[0047] As used herein, the term “domain” can refer to a particular region of a protein or polypeptide, which can be associated with a particular function. For example, “a domain which binds to a cognate” can refer to the domain of a protein that binds one or more receptors or other protein moieties and (i) block the biological effect of a molecule that typically binds to the same receptor or protein or modulate the effect (i.e., increase or decrease) the biological activity of the naturally occurring binding partner of the protein or receptor.

[0048] As used herein the term “dominant-negative activity” can refer to the ability of a peptide or polypeptide of the disclosure to act as an inhibitor by binding to the wild type protein from which it is derived (i.e., from which it shares identity) or by titrating an essential ligand that binds with the protein from which the peptide is derived.

[0049] As used herein a “drug-like peptide” can refer to a polymer of amino acids comprising amide bonds that form a peptide, which does not occur in nature and which can be delivered to a cell, tissue or subject such that the biological effect results in a treatment of a disease, disorder infection or inhibits the progression of a disease, disorder or infection or which can prevent getting the disease, disorder or infection. In one embodiment, a drug-like peptide is a peptide having the sequence of any one of SEQ ID Nos: 1-9489. In another embodiment, a drug-like peptide is a peptide that is at least 95%, 96%, 97%, 98%, or 99% identical to a peptide having the sequence of any of SEQ ID Nos: 1-9489. In still another embodiment, a drug-like peptide has the sequence of any one of SEQ ID Nos: 1-9489, wherein one or more (e.g., 1, 2, 3, 4, 5, 6, 7, 8, 9, 10, 11, 12, 13, 14, 15, 16, 17, 18, 19, 20, 21, 22, 23, 24, 25, 26, 27, 28, 29, 30, 31, 32, 33, 34, 35, 36, 37, 38, 39 or 40) of the amino acids is substitute with a non-naturally occurring or D-amino acid and which has the same biological activity (not necessarily to the same degree) as a peptide of the same sequence having all L-amino acids. A drug-like peptide can be formulated for suitable routes of delivery as a pharmaceutical composition and/or linked to a second domain having a similar or different biological activity. In some instances, a drug-like peptide can be fused to a peptide that functions to assist in delivery and/or uptake by a cell (e.g., a protein transduction domain).

[0050] The term “encode” as it is applied to polynucleotides can refer to a polynucleotide which is said to “encode” a polypeptide if, in its native state or when manipulated by methods well known to those skilled in the art, it can be transcribed and/or translated to produce the mRNA for the polypeptide and/or a fragment thereof. In some cases the antisense strand is the complement of such a nucleic acid, and the encoding sequence can be deduced therefrom.

[0051] The terms “equivalent” or “biological equivalent” are used interchangeably when referring to a particular molecule, biological, or cellular material and intend those having minimal homology while still maintaining desired structure or functionality.

[0052] “Eukaryotic cells” comprise all of the life kingdoms except monera. They can be easily distinguished through a membrane-bound nucleus. Animals, plants, fungi, and protists are eukaryotes or organisms whose cells are organized into complex structures by internal membranes and a cytoskeleton. One example of a membrane-bound structure is the nucleus. Unless specifically recited, the term “host” includes a eukaryotic host, including, for example, yeast, higher plant, insect and mammalian cells. Non-limiting examples of eukaryotic cells or hosts include simian, bovine, porcine, murine, rat, avian, reptilian and human.

[0053] As used herein, “expression” can refer to the process by which polynucleotides are transcribed into mRNA and/or the process by which the transcribed mRNA is subsequently being translated into peptides, polypeptides, or proteins. If the polynucleotide is derived from genomic DNA, expression can include splicing of the mRNA in a eukaryotic cell.

[0054] “Homology” or “identity” or “similarity” can refer to sequence similarity between two peptides or between two nucleic acid molecules. Homology can be determined by comparing a position in each sequence which can be aligned for purposes of comparison. For example, when a position in the compared sequence is occupied by the same base or amino acid, then the molecules are homologous at that position. A degree of homology between sequences is a function of the number of matching or homologous positions shared by the sequences. An “unrelated” or “non-homologous” sequence shares less than 40% identity, or alternatively less than 25% identity, with one of the sequences of the disclosure.

[0055] Homology refer to a percent (%) identity of a sequence to a reference sequence. As a practical matter, whether any particular sequence can be at least 50%, 60%, 70%, 80%, 85%, 90%, 92%, 95%, 96%, 97%, 98% or 99% identical to any sequence described herein, such particular peptide, polypeptide or nucleic acid sequence can be determined conventionally using known computer programs such the Bestfit program (Wisconsin Sequence Analysis Package, Version 8 for Unix, Genetics Computer Group, University Research Park, 575 Science Drive, Madison, Wis. 53711). When using Bestfit or any other sequence alignment program to determine whether a particular sequence is, for instance, 95% identical to a reference sequence, the parameters can be set such that the percentage of identity is calculated over the full length of the reference sequence and that gaps in homology of up to 5% of the total reference sequence are allowed.

[0056] For example, in a specific embodiment the identity between a reference sequence (query sequence, i.e., a sequence of the disclosure) and a subject sequence, also referred to as a global sequence alignment, can be determined using the FASTDB computer program based on the algorithm of Brutlag et al. (Comp. App. Biosci. 6:237-245 (1990)). In some cases, parameters for a particular embodiment in which identity is narrowly construed, used in a FASTDB amino acid alignment, can include: Scoring Scheme=PAM (Percent Accepted Mutations) 0, k-tuple=2, Mismatch Penalty=1, Joining Penalty=20, Randomization Group Length=0, Cutoff Score=1, Window Size=sequence length, Gap Penalty=5, Gap Size Penalty=0.05, Window Size=500 or the length of the subject sequence, whichever is shorter. According to this embodiment, if the subject sequence is shorter than the query sequence due to N- or C-terminal deletions, not because of internal deletions, a manual correction can be made to the results to take into consideration the fact that the FASTDB program does not account for N- and C-terminal truncations of the subject sequence when calculating global percent identity. For subject sequences truncated at the N- and C-termini, relative to the query sequence, the percent identity can be corrected by calculating the number of residues of the query sequence that are lateral to the N- and C-terminal of the subject sequence, which are not matched/aligned with a corresponding subject residue, as a percent of the total bases of the query sequence. A determination of whether a residue is matched/aligned can be determined by results of the FASTDB sequence alignment. This percentage can be then subtracted from the percent identity, calculated by the FASTDB program using the specified parameters, to arrive at a final percent identity score. This final percent identity score can be used for the purposes of this embodiment. In some cases, only residues to the N- and C-termini of the subject sequence, which are not matched/aligned with the query sequence, are considered for the purposes of manually adjusting the percent identity score. That is, only query residue positions outside the farthest N- and C-terminal residues of the subject sequence are considered for this manual correction. For example, a 90 residue subject sequence can be aligned with a 100 residue query sequence to determine percent identity. The deletion occurs at the N-terminus of the subject sequence and therefore, the FASTDB alignment does not show a matching/alignment of the first 10 residues at the N-terminus. The 10 unpaired residues represent 10% of the sequence (number of residues at the N- and C-termini not matched/total number of residues in the query sequence) so 10% is subtracted from the percent identity score calculated by the FASTDB program. If the remaining 90 residues were perfectly matched the final percent identity can be 90%. In another example, a 90 residue subject sequence is compared with a 100 residue query sequence. This time the deletions are internal deletions so there are no residues at the N- or C-termini of the subject sequence which are not matched/aligned with the query. In this case the percent identity calculated by FASTDB is not manually corrected. Once again, only residue positions outside the N- and C-terminal ends of the subject sequence, as displayed in the FASTDB alignment, which are not matched/aligned with the query sequence are manually corrected for.

[0057] “Hybridization” can refer to a reaction in which one or more polynucleotides react to form a complex that is stabilized via hydrogen bonding between the bases of the nucleotide residues. The hydrogen bonding can occur by Watson-Crick base pairing, Hoogstein binding, or in any other sequence-specific manner. The complex can comprise two strands forming a duplex structure, three or more strands forming a multi-stranded complex, a single self-hybridizing strand, or any combination of these. A hybridization reaction can constitute a step in a more extensive process, such as the initiation of a PC reaction, or the enzymatic cleavage of a polynucleotide by a ribozyme.

[0058] Examples of stringent hybridization conditions include: incubation temperatures of about 25° C. to about 37° C.; hybridization buffer concentrations of about 6× SSC to about 10× SSC; formamide concentrations of about 0% to about 25%; and wash solutions from about 4× SSC to about 8× SSC. Examples of moderate hybridization conditions include: incubation temperatures of about 40° C. to about 50° C.; buffer concentrations of about 9× SSC to about 2× SSC; formamide concentrations of about 30% to about 50%; and wash solutions of about 5× SSC to about 2× SSC. Examples of high stringency conditions include: incubation temperatures of about 55° C. to about 68° C.; buffer concentrations of about lx SSC to about 0.1× SSC; formamide concentrations of about 55% to about 75%; and wash solutions of about 1× SSC, 0.1×SSC, or deionized water. In general, hybridization incubation times are from 5 minutes to 24 hours, with 1, 2, or more washing steps, and wash incubation times are about 1, 2, or 15 minutes. SSC is 0.15 M NaCl and 15 mM citrate buffer. It is understood that equivalents of SSC using other buffer systems can be employed.

[0059] The term “isolated” as used herein can refer to molecules or biologicals or cellular materials being substantially free from other materials. In one aspect, the term “isolated” can refer to nucleic acid, such as DNA or RNA, or protein or polypeptide (e.g., an antibody or derivative thereof), or cell or cellular organelle, or tissue or organ, separated from other DNAs or RNAs, or proteins or polypeptides, or cells or cellular organelles, or tissues or organs, respectively, that are present in the natural source. The term “isolated” also can refer to a nucleic acid or peptide that is substantially free of cellular material, viral material, or culture medium when produced by recombinant DNA techniques, or chemical precursors or other chemicals when chemically synthesized. Moreover, an “isolated nucleic acid” is meant to include nucleic acid fragments which are not naturally occurring as fragments and may not be found in the natural state. In some cases, the term “isolated” is also used herein to refer to polypeptides which are isolated from other cellular proteins and is meant to encompass both purified and recombinant polypeptides. In some cases, the term “isolated” is also used herein to refer to cells or tissues that are isolated from other cells or tissues and is meant to encompass both cultured and engineered cells or tissues.

[0060] “Messenger RNA” or “mRNA” is a nucleic acid molecule that is transcribed from DNA and then processed to remove non-coding sections known as introns. In some cases, the resulting mRNA is exported from the nucleus (or another locus where the DNA is present) and translated into a protein. The term “pre-mRNA” can refer to the strand prior to processing to remove non-coding sections.

[0061] The term “microorganism” or “microbe” refers to a microscopic organism, especially a bacterium, virus, or fungus.

[0062] The term “protein”, “peptide” and “polypeptide” are used interchangeably and in their broadest sense to refer to a compound of two or more subunit amino acids, amino acid analogs or peptidomimetics. The subunits can be linked by peptide bonds. In another embodiment, the subunit can be linked by other bonds, e.g., ester, ether, etc. A protein or peptide can contain at least two amino acids and no limitation is placed on the maximum number of amino acids which can comprise a protein's or peptide's sequence. As mentioned above, the term “amino acid” can refer to either natural and/or unnatural or synthetic amino acids, including glycine and both the D and L optical isomers, amino acid analogs and peptidomimetics. As used herein, the term “fusion protein” can refer to a protein comprised of domains from more than one naturally occurring or recombinantly produced protein, where generally each domain serves a different function. In this regard, the term “linker” can refer to a peptide fragment that is used to link these domains together—optionally to preserve the conformation of the fused protein domains and/or prevent unfavorable interactions between the fused protein domains which can compromise their respective functions.

[0063] The terms “polynucleotide” and “oligonucleotide” are used interchangeably and refer to a polymeric form of nucleotides of any length, either deoxyribonucleotides or ribonucleotides or analogs thereof. Polynucleotides can have any three dimensional structure and can perform any function, known or unknown. The following are non-limiting examples of polynucleotides: a gene or gene fragment (for example, a probe, primer, EST or SAGE tag), exons, introns, messenger RNA (mRNA), transfer RNA, ribosomal RNA, RNAi, ribozymes, cDNA, recombinant polynucleotides, branched polynucleotides, plasmids, vectors, isolated DNA of any sequence, isolated RNA of any sequence, nucleic acid probes and primers. A polynucleotide can comprise modified nucleotides, such as methylated nucleotides and nucleotide analogs. If present, modifications to the nucleotide structure can be imparted before or after assembly of the polynucleotide. The sequence of nucleotides can be interrupted by non-nucleotide components. A polynucleotide can be further modified after polymerization, such as by conjugation with a labeling component. The term also can refer to both double and single stranded molecules. Unless otherwise specified or required, any embodiment of this disclosure that is a polynucleotide can encompass both the double stranded form and each of two complementary single stranded forms known or predicted to make up the double stranded form.

[0064] The term “polynucleotide sequence” can be the alphabetical representation of a polynucleotide molecule. This alphabetical representation can be input into databases in a computer having a central processing unit and used for bioinformatics applications such as functional genomics and homology searching.

[0065] Similarly, the term “polypeptide sequence”, “peptide sequence” or “protein sequence” can be the alphabetical representation of a polypeptide molecule. This alphabetical representation can be input into databases in a computer having a central processing unit and used for bioinformatics applications such as functional proteomics and homology searching.

[0066] As used herein, the term “recombinant expression system” refers to a genetic construct or constructs for the expression of certain genetic material formed by recombination.

[0067] As used herein, the term “recombinant protein” can refer to a polypeptide or peptide which is produced by recombinant DNA techniques, wherein generally, DNA encoding the polypeptide or peptide is inserted into a suitable expression vector which is in turn used to transform a host cell to produce the heterologous polypeptide or peptide.

[0068] The term “sample” as used herein, generally refers to any sample of a subject (such as a blood sample or a tissue sample). A sample can comprise a tissue, a cell, serum, plasma, exosomes, a bodily fluid, or any combination thereof. A bodily fluid can comprise urine, blood, serum, plasma, saliva, mucus, spinal fluid, tears, semen, bile, amniotic fluid, or any combination thereof. A sample or portion thereof can comprise an extracellular fluid obtained from a subject. A sample or portion thereof can comprise cell-free nucleic acid, DNA or RNA. A sample can be a sample removed from a subject via a non-invasive technique, a minimally invasive technique, or an invasive technique. A sample or portion thereof can be obtained by a tissue brushing, a swabbing, a tissue biopsy, an excised tissue, a fine needle aspirate, a tissue washing, a cytology specimen, a surgical excision, or any combination thereof. A sample or portion thereof can comprise tissues or cells from a tissue type. For example, a sample can comprise a nasal tissue, a trachea tissue, a lung tissue, a pharynx tissue, a larynx tissue, a bronchus tissue, a pleura tissue, an alveoli tissue, breast tissue, bladder tissue, kidney tissue, liver tissue, colon tissue, thyroid tissue, cervical tissue, prostate tissue, heart tissue, muscle tissue, pancreas tissue, anal tissue, bile duct tissue, a bone tissue, brain tissue, spinal tissue, kidney tissue, uterine tissue, ovarian tissue, endometrial tissue, vaginal tissue, vulvar tissue, uterine tissue, stomach tissue, ocular tissue, sinus tissue, penile tissue, salivary gland tissue, gut tissue, gallbladder tissue, gastrointestinal tissue, bladder tissue, brain tissue, spinal tissue, a blood sample, or any combination thereof.

[0069] The term “sequencing” as used herein, can comprise bisulfite-free sequencing, bisulfite sequencing, TET-assisted bisulfite (TAB) sequencing, ACE-sequencing, high-throughput sequencing, Maxam-Gilbert sequencing, massively parallel signature sequencing, Polony sequencing, 454 pyrosequencing, Sanger sequencing, Illumina sequencing, SOLiD sequencing, Ion Torrent semiconductor sequencing, DNA nanoball sequencing, Heliscope single molecule sequencing, single molecule real time (SMRT) sequencing, nanopore sequencing, shot gun sequencing, RNA sequencing, Enigma sequencing, or any combination thereof.

[0070] The term “subject” as used herein, refers to an animal, including, but not limited to, a primate (e.g., human, monkey, chimpanzee, gorilla, and the like), rodents (e.g., rats, mice, gerbils, hamsters, ferrets, and the like), lagomorphs, swine (e.g., pig, miniature pig), equine, canine, feline, and the like. The terms “subject” and “patient” are used interchangeably herein. For example, a mammalian subject can refer to a human patient.

[0071] As used herein, the terms “transformation” and “transfection” are intended to refer to a variety of art-recognized techniques for introducing foreign nucleic acid into a host cell, including calcium phosphate or calcium chloride co-precipitation, DEAE-dextran-mediated transfection, lipofection (e.g., using commercially available reagents such as, for example, LIPOFECTIN® (Invitrogen Corp., San Diego, Calif.), LIPOFECTAMINE®(Invitrogen), FUGENE® (Roche Applied Science, Basel, Switzerland), JETPEI™ (Polyplus-transfection Inc., New York, N.Y.), EFFECTENE® (Qiagen, Valencia, Calif.), DREAMFECT™ (OZ Biosciences, France) and the like), or electroporation. Suitable methods for transforming or transfecting host cells can be found in Sambrook, et al. (Molecular Cloning: A Laboratory Manual. 2nd, ed., Cold Spring harbor Laboratory, Cold Spring Harbor Laboratory Press, Cold Spring Harbor, N.Y., 1989), and other laboratory manuals. Standard recombinant DNA and molecular cloning techniques used herein are well known in the art and are described in Sambrook, J., Fritsch, E. F. and Maniatis, T., Molecular Cloning: A Laboratory Manual, 2^{nd} ed.; Cold Spring Harbor Laboratory: Cold Spring Harbor, N.Y., (1989) and by Silhavy, T. J., Bennan, M. L. and Enquist, L. W., Experiments with Gene Fusions; Cold Spring Harbor Laboratory: Cold Spring Harbor, N.Y., (1984); and by Ausubel, F. M. et. al., Current Protocols in Molecular Biology, Greene Publishing and Wiley-Interscience (1987) each of which are hereby incorporated by reference in its entirety. Additional useful methods are described in manuals including Advanced Bacterial Genetics (Davis, Roth and Botstein, Cold Spring Harbor Laboratory, 1980), Experiments with Gene Fusions (Silhavy, Berman and Enquist, Cold Spring Harbor Laboratory, 1984), Experiments in Molecular Genetics (Miller, Cold Spring Harbor Laboratory, 1972) Experimental Techniques in Bacterial Genetics (Maloy, in Jones and Bartlett, 1990), and A Short Course in Bacterial Genetics (Miller, Cold Spring Harbor Laboratory 1992) each of which are hereby incorporated by reference in its entirety.

[0072] The terms “treat”, “treating” and “treatment”, as used herein, refers to ameliorating symptoms associated with a disease or disorder (e.g., cancer, Covid-19 etc.), including preventing or delaying the onset of the disease or disorder symptoms, and/or lessening the severity or frequency of symptoms of the disease or disorder.

[0073] As used herein, the term “vector” can refer to a nucleic acid construct deigned for transfer between different hosts, including but not limited to a plasmid, a virus, a cosmid, a phage, a BAC, a YAC, etc. In some embodiments, a “viral vector” is defined as a recombinantly produced virus or viral particle that comprises a polynucleotide to be delivered into a host cell, either in vivo, ex vivo or in vitro. In some embodiments, plasmid vectors can be prepared from commercially available vectors. In other embodiments, viral vectors can be produced from baculoviruses, retroviruses, adenoviruses, AAVs, etc. according to techniques known in the art. In one embodiment, the viral vector is a lentiviral vector. Examples of viral vectors include retroviral vectors, adenovirus vectors, adeno-associated virus vectors, alphavirus vectors and the like. Infectious tobacco mosaic virus (TMV)-based vectors can be used to manufacturer proteins and have been reported to express Griffithsin in tobacco leaves (O′Keefe et al. (2009) Proc. Nat. Acad. Sci. USA 106(15):6099-6104). Alphavirus vectors, such as Semliki Forest virus-based vectors and Sindbis virus-based vectors, have also been developed for use in gene therapy and immunotherapy. See, Schlesinger & Dubensky (1999) Curr. Opin. Biotechnol. 5:434-439 and Ying et al. (1999) Nat. Med. 5(7):823-827. In aspects where gene transfer is mediated by a retroviral vector, a vector construct can refer to the polynucleotide comprising the retroviral genome or part thereof, and a gene of interest. Further details as to modern methods of vectors for use in gene transfer can be found in, for example, Kotterman et al. (2015) Viral Vectors for Gene Therapy: Translational and Clinical Outlook Annual Review of Biomedical Engineering 17. Vectors that contain both a promoter and a cloning site into which a polynucleotide can be operatively linked are well known in the art. Such vectors are capable of transcribing RNA in vitro or in vivo and are commercially available from sources such as Agilent Technologies (Santa Clara, Calif.) and Promega Biotech (Madison, Wis.). In one aspect, the promoter is a pol III promoter.

[0074] Certain vectors are capable of autonomous replication in a host cell into which they are introduced (e.g., bacterial vectors having a bacterial origin of replication and episomal mammalian vectors). Other vectors (e.g., non-episomal mammalian vectors) are integrated into the genome of a host cell upon introduction into the host cell, and thereby are replicated along with the host genome. Moreover, certain vectors are capable of directing the expression of genes to which they are operatively linked. Such vectors are referred to herein as “expression vectors.” In general, expression vectors of utility in recombinant DNA techniques are often in the form of plasmids. In the present specification, “plasmid” and ‘Vector” can be used interchangeably. However, the disclosure is intended to include such other forms of expression vectors, such as viral vectors (e.g., replication defective retroviruses, adenoviruses and adeno-associated viruses), which serve equivalent functions. Typically, the vector or plasmid contains sequences directing transcription and translation of a relevant gene or genes, a selectable marker, and sequences allowing autonomous replication or chromosomal integration. Suitable vectors comprise a region 5′ of the gene which harbors transcriptional initiation controls and a region 3′ of the DNA fragment which controls transcription termination. Both control regions may be derived from genes homologous to the transformed host cell, although it is to be understood that such control regions may also be derived from genes that are not native to the species chosen as a production host.

[0075] Typically, the vector or plasmid contains sequences directing transcription and translation of a gene fragment, a selectable marker, and sequences allowing autonomous replication or chromosomal integration. Suitable vectors comprise a region 5′ of the gene which harbors transcriptional initiation controls and a region 3′ of the DNA fragment which controls transcription termination. Both control regions may be derived from genes homologous to the transformed host cell, although it is to be understood that such control regions may also be derived from genes that are not native to the species chosen as a production host.

[0076] Initiation control regions or promoters, which are useful to drive expression of the relevant pathway coding regions in the desired host cell are numerous and familiar to those skilled in the art. Virtually any promoter capable of driving these genetic elements is suitable for the present invention including, but not limited to, lac, ara, tet, trp, IPL, IPR, T7, tac, and trc (useful for expression in Escherichia coli and Pseudomonas); the amy, apr, npr promoters and various phage promoters useful for expression in Bacillus subtilis, and Bacillus licheniformis; nisA (useful for expression in gram positive bacteria, Eichenbaum et al. Appl. Environ. Microbiol. 64(8):2763-2769 (1998)); and the synthetic P11 promoter (useful for expression in Lactobacillus plantarum, Rud et al., Microbiology 152:1011-1019 (2006)). Termination control regions may also be derived from various genes native to the preferred hosts.

[0077] Genetic screening has rapidly become a ubiquitous tool to probe protein function and accelerate drug discovery. Libraries of genetically encoded perturbations (CRISPR-Cas9 sgRNA, siRNA, etc.) enable high throughput identification of proteins essential to cancer cells fitness, disease progression and infectivity. However, existing screens typically fail to capture how proteins function biologically and provide little information on how to target hits therapeutically. Transposon mediated fragmentation and overexpression of cDNA has been used to identify peptide inhibitors of essential proteins in Saccharomyces cerevisiae. However, these libraries randomly generate gene fragments of various lengths hindering control of library composition, feature many out of frame fragments, and are limited in their translational relevance due to the choice of model organism. To overcome these challenges, provided herein is a platform-based screening methodology that uses overexpressed libraries of overlapping synthesized gene fragments that can be used to identify protein functional regions associated with an abnormal or disease cell fitness (e.g., cancer cell fitness), as well as dominant negative inhibitors of abnormal or disease cell growth (e.g., cancer cell growth) and as inhibitors of infectious agents.

[0078] Inhibitory peptides have immense potential as both research tools and therapeutics. Direct inhibition of protein activity without genetic alteration opens unique screening avenues with which to probe protein function. For example, protein-protein interaction networks could be more precisely perturbed via inhibitory peptides contacting a specific protein surface in contrast to complete genetic knockdown. The ability to identify protein regions associated with cell fitness can also serve to complement traditional drug development efforts, such as through determining critical residues for inhibition via small molecules or antibodies. Additionally, this screening method identifies inhibitory peptides that are immediately translatable, bypassing the need for additional high-throughput screens to identify candidate molecules.

[0079] Many proteins can be inhibited in a dominant negative fashion by short peptides/proteins derived from their own wild type coding sequence. Leveraging this fact, the disclosure provides compositions and methods that use a comprehensive lentiviral library of gene fragments tiling key oncogenes via a highly modular oligonucleotide synthesis protocol. This library was then used to conduct a pooled fitness screen, mining novel peptide motifs which selectively reduce cellular proliferation in breast cancer cell lines dependent on Ras/Myc signaling. Furthermore, by mapping peptides to their parent oncogenes (see, e.g., Table 1), conserved regions of depletion which revealed protein domains essential for cell fitness were identified. Coupling of cell penetrating motifs or other peptide delivery compositions to these peptides provides a drug-like function. Using the screening methods described herein, drugable peptide compositions were developed, such as for example, from EGFR and RAF1 which were able to inhibiting cell growth at IC₅₀S of 30-60 μM. Taken together, this approach enabled rapid discovery of potentially translatable peptide therapeutics, as well as de novo mapping of essential protein domains.

[0080] The screening strategy presented herein can probe protein functional regions with single amino acid resolution and can be readily scalable due to the ease of array-based oligonucleotide synthesis. In the exemplary studies presented herein, the platform-based screening methodology disclosed can identify peptide inhibitors of known oncogenes, including proteins, such as KRAS, that are a challenge to target using small molecule therapeutics. In addition, the screening methods of the disclosure were used to develop anti-infectivity agents that inhibit, e.g., viral infection such as infection by betaviruses (e.g., SARS-Cov2). As such, the screening methodology disclosed herein enables rapid discovery of potentially translatable peptide therapeutics and can be easily adaptable to diverse target genes and pathogenic contexts. These pathogenic contexts are not limited to cancer cell fitness. This methodology can be compatible with screening for higher level phenotypes via FACS, scRNAseq, as well as functional assays.

[0081] In a particular embodiment, the screening methodology described herein comprises providing a plurality of gene fragments which code for potentially inhibiting peptides for a targeted gene or genes (e.g., oncogenes, cell surface receptors, viral binding ligands etc.). The plurality of gene fragments may be generated by in silico pooled oligonucleotide synthesis technologies to generate large gene fragment libraries for use in the screening methods disclosed herein. Concepts from screening methodologies for CRISPR-based technologies can be used with the screening methodologies disclosed herein, including the CRISPR based screening methods found in Wang, T., Wei, J. J., Sabatini, D. M. & Lander, E. S., Science 343, 80-84 (2014); Gilbert, L. A. et al., Cell 159, 647-661 (2014); Shalem, O., Sanjana, N. E. & Zhang, F., Nat Rev Genet 16:299-311 (2015); Shalem, O. et al., Science 343, 84-87 (2014) each of which is hereby incorporated by reference in its entirety.

[0082] The disclosure provides synthesis of a gene fragment library using methods known to those of skill in the art. Gene fragments are then delivered to cells, using methods known to those in the art, including viral and non-viral methods. In a particular embodiment, the gene fragments are delivered to cells using lentiviral transduction. The disclosure provides that the cells may be cultured, such as under selective pressure and lysed and sequenced, such as deep-sequencing may be performed, to identify one or more nucleic acids from the library that are introduced into the cells using methods known to those of skill in the art, such as those described in Shalem, O., Sanjana, N. E. & Zhang, F., Nat Rev Genet 16:299-311 (2015); Shalem, O. et al., Science 343, 84-87 (2014); Agrotis, A. & Ketteler, R.,. Front Genet 6:300, each of which is hereby incorporated by reference in its entirety. Statistically-overrepresented nucleic acids may be determined using methods associated with pooled and arrayed screens (See Agrotis, A. & Ketteler, R. A new age in functional genomics using CRISPR/Cas9 in arrayed library screening. Front Genet 6, 300 (201S) hereby incorporated by reference in its entirety).

[0083] In a particular embodiment, a gene fragment library coding for potentially inhibitor peptides are synthesized via pooled oligonucleotide synthesis using solid-phase synthesis. Solid-phase synthesis is typically carried out on a solid support held between filters, in columns that enable all reagents and solvents to pass through freely. Solid-phase synthesis has a number of advantages over solution synthesis, including, large excesses of solution-phase reagents can be used to drive reactions quickly to completion; impurities and excess reagents are washed away and no purification may be required after each step; and the process is amenable to automation on computer-controlled solid-phase synthesizers. Solid supports (also called resins) are the insoluble particles, typically 50-200 μm in diameter, to which the oligonucleotide can be bound during synthesis. Many types of solid support have been used, but controlled pore glass (CPG) and polystyrene have proved to be the most useful.

[0084] The phosphoramidite method, pioneered by Marvin Caruthers in the early 1980s, and enhanced by the application of solid-phase technology and automation, is typically used. Phosphoramidite oligo synthesis proceeds in the 3′- to 5′-direction (opposite to the 5′- to 3′-direction of DNA biosynthesis in DNA replication). One nucleotide can be added per synthesis cycle. At the beginning of oligonucleotide synthesis, the first protected nucleoside can be pre-attached to the resin and the operator selects an A, G, C or T synthesis column depending on the nucleoside at the 3′-end of the desired oligonucleotide. The support-bound nucleoside has a 5′-DMT protecting group (DMT=4,4′-dimethoxytrityl), the role of which is to prevent polymerization during resin functionalization, and this protecting group must be removed (detritylation) from the support-bound nucleoside before oligonucleotide synthesis can proceed. Following detritylation, the support-bound nucleoside is ready to react with the next base, which can be added in the form of a nucleoside phosphoramidite monomer. A large excess of the appropriate nucleoside phosphoramidite can be mixed with an activator (tetrazole or a derivative), both of which are dissolved in acetonitrile (a good solvent for nucleophilic displacement reactions). The diisopropylamino group of the nucleoside phosphoramidite can be protonated by the activator, and can be thereby converted to a good leaving group. It can be rapidly displaced by attack of the 5′-hydroxyl group of the support-bound nucleoside on its neighboring phosphorus atom, and a new phosphorus-oxygen bond can be formed, creating a support-bound phosphite trimester. Nucleoside phosphoramidites are reasonably stable in an inert atmosphere and can be prepared in large quantities, shipped around the world and stored as dry solids for several months prior to use. Only upon protonation do nucleoside phosphoramidites become reactive.

[0085] It may not be unreasonable to expect a yield of 99.5% during each coupling step, but even with the most efficient chemistry and the purest reagents it may not be possible to achieve 100% reaction of the support-bound nucleoside with the incoming phosphoramidite. This means that there will be a few unreacted 5′-hydroxyl groups on the resin-bound nucleotide; if left unchecked, these 5′-hydroxyl groups would be available to partake in the next coupling step, reacting with the incoming phosphoramidite. The resulting oligonucleotide would lack one base. Deletion mutations are avoided by introducing a “capping” step after the coupling reaction, to block the unreacted 5′-hydroxyl groups. Two capping solutions are used on the synthesizer: acetic anhydride and N-methylimidazole (NMI). These two reagents (dissolved in tetrahydrofuran with the addition of a small quantity of pyridine) are mixed on the DNA synthesizer prior to delivery to the synthesis column. The electrophilic mixture rapidly acetylates alcohols, and the pyridine ensures that the pH remains basic to prevent detritylation of the nucleoside phosphoramidite by the acetic acid formed by reaction of acetic anhydride with NMI. Acetylation of the 5′-hydroxyl groups renders them inert to subsequent reactions.

[0086] After phosphoramidite coupling, capping and oxidation, the DMT protecting group at the 5′-end of the resin-bound DNA chain are removed so that the primary hydroxyl group can react with the next nucleotide phosphoramidite. Deprotection with trichloroacetic acid in dichloromethane can be rapid and quantitative. An orange color can be produced by cleaved DMT carbocation, which absorbs in the visible region at 495 nm. The intensity of this absorbance is used to determine the coupling efficiency. Most commercially available DNA synthesizers have hardware to measure and record the trityl yield for each cycle so that the efficiency of synthesis can be monitored in real time. The cycle can be repeated, once for each base, to produce the required oligonucleotide. The linker can be a chemical entity that attaches the 3′-end of the oligonucleotide to the solid support. It must be stable to all the reagents used in solid-phase oligonucleotide assembly, but cleavable under specific conditions at the end of the synthesis. The cleavage reaction can be carried out automatically on some synthesizers, and the ammoniacal solution containing the oligonucleotide can be delivered to a glass vial. Alternatively, the cleavage can be carried out manually by taking the column off the synthesizer and washing it with syringes containing ammonium hydroxide. The oligonucleotide, now dissolved in concentrated aqueous ammonia, can be heated to remove the protecting groups from the heterocyclic bases and phosphates. The aqueous solution can then removed by evaporation and the oligonucleotides are ready for purification.

[0087] Gene fragment libraries can be generated by splitting target gene(s) or relevant protein interaction partners into defined size fragments (e.g., 100 to 150 nt fragments). Several different commercial platforms exist for producing pooled oligonucleotides (e.g., CustomArray, Twist Bioscience, Agilent Technologies). Site directed mutagenesis can also be performed to optimize gene fragments for particular applications. Additionally, computational structure guided library design can be used to construct de novo gene fragment libraries which have predicted binding to target genes. The gene oligonucleotides are synthesized as gene fragment library which includes a plurality of gene fragments having more than 50, 100, 200, 300, 400, 500, 600, 700, 800, 1000, 1500, 2000, 5000, 10000 different sequences based from one or more target genes. Examples of target genes includes genes associated with a disease or disorder condition, such as oncogenes, or targets of infectious agents. The screening methodology of the disclosure can be agnostic to the disease model chosen. In theory, peptide inhibitors (drug-like peptides) of any protein target can be identified using the screening methods disclosed herein. The method can be assisted by having an in vitro assay to select for the phenotype of interest when contacted with a drug-like peptide. Alternatively, novel dominant negative inhibitors of protein function could be produced and sold as scientific reagents. Peptides across a wide size range (5-60 AA) can be screened via the screening methods disclosed herein, highlighting the broad utility of the screening methods of the disclosure as a platform technology.

[0088] In a particular embodiment, the gene fragments used in the screening methods disclosed herein are gene fragments of one or more oncogenes. Examples of oncogenes, include are but not limited to, MCL-1, BCR, BRAF, JAK1, JAK2, VEGF, EGFR, ALK, CDK1, CDK2, CDK3, CDK3, CDK4, BRCA, PIK3CA, MEK, C-KIT, NRAS, ABCB11, ANTXR2, BCOR, CDKN1B, CYP27A1, EMD, FANCF, ABCC8, APC, BCORL1, CDKN2A, CYP27B1, EP300, FANCG, ABCC9, AR, BLM, CEP290, DAXX, EPCAM, FANCI, ABCD1, ARID1A, BMPR1A, CFTR, DBT, EPHAS, FANCL, ABL1, ARID2, RAF1, CHEK1, DCC, EPHB2, FANCM, ACADM, ARSA, BRCA1, CHEK2, DCX, ERBB2, FAS, CADS, ASAH1, BRCA2, CHM, DDB2, ERBB3, FAT3, ACADVL, ASCC1, BRIP1, CIC, DDR2, ERBB4, FBXO11, ACTC1, ASL, BTD, CLN3, DES, ERCC2, FBXO32, ACTN2, ASPA, BTK, CLNS, DHCR7, ERCC3, FBXW7, ACVR1B, ASS1, BUB1B, CLN6, DICER1, ERCC4, FGD4, ADA, ASXL1, CALR3, CLN8, DIS3L2, ERCCS, FGFR1, ADAMTS13, ATM, CARD11, COL1A2, DKC1, ERCC6, FGFR2, ADAMTS2, ATP4A, CASP8, COL4A3, DLD, ERRFI1, FGFR3, AGA, ATP6V0D2, CAV3, COL4A4, DMD, ESCO2, FH, AGL, ATP7A, CBFB, COL7A1, DNAJB2, ESR1, FKTN, AGPS, ATP7B, CBL, COX15, DNMT3A, ETV6, FLCN, AHI1, ATP8B1, CBLB, CREBBP, DSC2, EXOC2, FLT3, AIP, ATR, CBLC, CRLF2, DSE, EXT1, FMR1, AKAP9, ATRX, CBS, CRTAP, DSC2, EXT2, FUBP1, AKT1, AXIN1, CCDC178, CRYAB, DSP, EYA4, FZD3, AKT2, AXIN2, CCNE1, CSF1R, DTNA, EZH2, G6PC, ALB, BAG3, CD79A, CSMD3, ECT2L, F11, GAA, ALDH3A2, BAI3, CD79B, CSRP3, EDA, F5, GABRA6, ALDOB, BAP1, CD96, CTNNB1, EDN3, FAH, GALNT12, ALK, BARD1, CDC27, CTNS, EDNRB, FAM46C, GALT, ALS2, BAX, CDC73, CTSK, EED, FANCA, GATA1, AMER1, BAZ2B, CDH1, CUBN, EGFR, FANCB, GATA2, AMPD1, BCKDHA, CDH23, CYLD, EGR2, FANCC, GATA3, AMPH, BCKDHB, CDK12, CYP11A1, EHBP1, FANCD2, GATAD1, ANTXR1, BCL6, CDK4, CYP21A2, ELMO1, FANCE, GBA, GCDH, JAK1, MDM2, NEK2, PLOD1, ROS1, SMPD1, GJB2, JAK2, MECP2, NEXN, PLP1, RPGRIP1L, SOX10, GLA, JAK3, MED12, NF1, PMP22, RS1, SOX2, GLB1, JUP, MEFV, NF2, PMS2, RSPO1, SPEG, GLI1, KAT6A, MEN1, NFE2L2, POLD1, RTEL1, SPOP, GLI3, KCNQ1, MET, NFKBIA, POLE, RUNX1, SRC, GLMN, KDM4B, MFSD8, NIPA2, POLH, RUNX1T1, SSTR1, GNA11, KDM6A, MIER3, NKX3-1, POMGNT1, RYR2, STAG2, GNAQ, KDR, MITF, NOTCH1, POMT1, S1PR2, STAR, GNAS, KEAP1, MKS1, NOTCH2, POU1F1, SAMD9L, STK11, GNPTAB, KIF1B, MLH1, NPC1, POU6F2, SBDS, SUFU, GPC3, KIT, MLH3, NPC2, PPM1L, SCN11A, SUZ12, GPC6, KLF6, MMAB, NPHP1, PPP2R1A, SCN5A, SYNE3, GPR78, KLHDC8B, MPL, NPHP4, PPT1, SCNN1A, TAZ, GRIN2A, KMT2A, MPZ, NPM1, PRDM1, SCNN1B, TBX20, GRM8, KMT2C, MRE11A, PRKAG2, SCNN1G, TCAP, GXYLT1, KMT2D, MSH2, NRCAM, PRKAR1A, SCO2, TCERG1, H3F3A, KRAS, MSH3, NTRK1, PRKDC, SDHA, TCF7L2, HADHA, KREMEN1, MSH6, NUP62, PROC, SDHAF2, TERT, HADHB, L1CAM, MSMB, OR5L1, PROP1, SDHB, TET2, HBB, LAMA2, MSR1, OTC, PRPF40B, SDHC, TFG, HESX1, LAMA4, MTAP, OTOP1, PRX, SDHD, TGFB3, HEXA, LAMP2, MTHFR, PAH, PSAP, SEPT9, TGFBR1, HEXB, LDB3, MTM1, PALB2, PSEN1, SETBP1, TGFBR2, HFE, LEPRE1, MTOR, PALLD, PSEN2, SETD2, THSD7B, HGSNAT, LIG4, MUC16, PAX5, PTCH1, SF1, TINF2, HIST1H3B, LMNA, MUT, PAX6, PTCH2, SF3A1, TMC6, HNF1A, LPAR2, MUTYH, PBRM1, PTEN, SF3B1, TMC8, HRAS, LRP1B, MYBPC3, PCDH15, PTGFR, SGCD, TMEM127, HSPH1, LRPPRC, MYC, PCGF2, PTPN11, SGSH, TMEM43, IDH1, LRRK2, MYD88, PDE11A, PTPN12, SH2B3, TMEM67, IDH2, LYST, MYH6, PDGFRA, RAC1, SLC25A4, TMPO, IGF2R, MAP2K1, MYH7, PDHA1, RAD21, SLC26A2, TNFAIP3, IGHMBP2, MAP2K2, MYL2, PDZRN3, RAD50, SLC37A4, TNFRSF14, IGSF10, MAP2K4, MYL3, PEX1, RAD51B, SLC7A8, TNNC1, IKBKAP, MAP3K1, MYLK2, PEX7, RAD51C, SLC9A9, TNNI3, IKZF1, MAP4K3, MYO1B, PHF6, RAD51D, SLX4, TNNT1, IKZF4, MAP7, MYO7A, PIK3CA, RARB, SMAD2, TNNT2, IL2RG, MAPK10, MYOZ2, PIK3CG, RB1, SMAD4, TP53, IL6ST, MAS1L, MYPN, PIK3R1, RBM20, SMARCA4, TPM1, IL7R, MAX, NBN, PKHD1, RECQL4, SMARCB1, TPP1, INVS, MC1R, NCOA2, PKP2, RET, SMC1A, TRAF5, IRAK4, MCCC2, NCOR1, PLEKHG5, RHBDF2, SMC3, TRIO, ITCH, MCOLN1, NDUFA13, PLN, RNASEL, SMO, TRPV4, TRRAP, U2AF1, USH1C, WAS, WWP1, ZIC3, TSC1, U2AF2, USH1G, WBSCR17, XPA, ZNF2, TSC2, UBA1, USP16, WEE1, XPC, ZNF226, TSHB, UBR3, USP25, WNK2, XRCC3, ZNF473, TSHR, UROD, VCL, WRN, ZBED4, ZNF595, TTN, UROS, VHL, WT1, ZFHX3, HER2, and ZRSR2. In a further embodiment, the oncogenes includes oncogenes selected from KRAS, HRAS, NRAS, RAF1, BRAF, ARAF, Myc, Max, FBXW7, and EGFR. In another embodiment, the gene fragments used in the screening methods disclosed herein are gene fragments of one or more receptors used as ligands for viruses. Examples of such receptor, include but are not limited to, CD4, poliovirus receptor, ICAM-1, Integrin (VLA-2), Coxsackievirus-adenovirus receptor (CAR), HAVcr-1, VACM-1, laminin receptor, angiotensin-converting enzyme 1 or 2 (ACE-1 or -2), MCP (CD46), SLAM, nectin-1, nectin-2, TNFR family, dipeptidyl peptidase-4 or -8 or -9, and CD21. The sequences of the oncogene/oncoproteins identified herein and above as well as the receptor identified herein have sequences that are known, as well as characterized biological activity. For example, AKT1 encodes RAC-alpha serine/threonine-protein kinase. This enzyme belongs to the AKT subfamily of serine/threonine kinases that contain SH2 (Src homology 2-like) domains. In some cases, it is commonly referred to as PKB, or by both names as “Akt/PKB”. AKT1 was originally identified as the oncogene in the transforming retrovirus, AKT8. In some cases, “BRAF” is a human gene that encodes a protein called B-Raf. The gene can also be referred to as proto-oncogene B-Raf and v-Raf murine sarcoma viral oncogene homolog B, while the protein can be more formally known as serine/threonine-protein kinase B-Raf. In some cases, the B-Raf protein is involved in sending signals inside cells which are involved in directing cell growth. In some cases, the mammalian target of rapamycin (mTOR), sometimes also referred to as the mechanistic target of rapamycin and FK506-binding protein 12-rapamycin-associated protein 1 (FRAP1), is a kinase that in humans is encoded by the MTOR gene. mTOR is a member of the phosphatidylinositol 3-kinase-related kinase family of protein kinases. mTOR links with other proteins and serves as a core component of two distinct protein complexes, mTOR complex 1 and mTOR complex 2, which regulate different cellular processes. In particular, as a core component of both complexes, mTOR functions as a serine/threonine protein kinase that regulates cell growth, cell proliferation, cell motility, cell survival, protein synthesis, autophagy, and transcription. mTOR also functions as a tyrosine protein kinase that promotes the activation of insulin receptors and insulin-like growth factor 1 receptors. Over-activation of mTOR signaling significantly contributes to the initiation and development of tumors and mTOR activity was found to be deregulated in many types of cancer including breast, prostate, lung, melanoma, bladder, brain, and renal carcinomas. Various oncogenes and receptors coding sequence as well as the expressed polypeptides are described in Table 1.

[0089] Once synthesized, oligonucleotides are cloned into the appropriate vector for the biological model and planned screening study. In a particular embodiment, the gene fragments are packaged into viral vectors for delivery of gene fragments to target cells for overexpression. Viral vectors are introduced at a low multiplicity of infection (MOI) in order to ensure that cells receive only a single gene fragment from the library pool. Examples of viral vectors, include, but are not limited to, recombinant retroviral vectors, adenoviral vectors, adeno-associated viral vector, alphaviral vectors, and lentiviral vectors. In a particular embodiment, the viral vector is a lentiviral vector. Because lentiviruses integrate into the genome, the viral integrant serves as a tag for readout of which sgRNA construct can be delivered to a particular cell. Lentivirus is unique in its ability to infect non-dividing cells, and therefore has a wider range of potential applications. In some cases, the lentiviral genome in the form of RNA is reverse-transcribed when the virus enters the cell to produce DNA, which is then inserted into the genome at a position determined by the viral integrase enzyme. For safety reasons lentiviral vectors never carry the genes required for their replication.

[0090] In another embodiment, the viral vector is an adeno-associated virus (AAV). AAV is a tiny non-enveloped virus having a 25 nm capsid. In some cases, no disease is known or has been shown to be associated with the wild type virus. AAV has a single-stranded DNA (ssDNA) genome. AAV has been shown to exhibit long-term episomal transgene expression, and AAV has demonstrated excellent transgene expression in the brain, particularly in neurons. Vectors containing as little as 300 base pairs of AAV can be packaged and can integrate. Space for exogenous DNA can be limited to about 4.7 kb. An AAV vector such as that described in Tratschin et al., Mol. Cell. Biol. 5:3251-3260 (1985) can be used to introduce DNA into cells. A variety of nucleic acids have been introduced into different cell types using AAV vectors (see for example Hermonat et al., Proc. Natl. Acad. Sci. USA 81 :6466-6470 (1984); Tratschin et al., Mol. Cell. Biol. 4:2072- 2081 (1985); Wondisford et al., Mol. Endocrinol. 2:32-39 (1988); Tratschin et al., J. Virol. 51 :611-619 (1984); and Flotte et al., J. Biol. Chem. 268:3781-.3790 (1993). There are numerous alternative AAV variants (over 100 have been cloned), and AAV variants have been identified based on desirable characteristics. For example, AAV9 has been shown to efficiently cross the blood-brain barrier. Moreover, the AAV capsid can be genetically engineered to increase transduction efficient and selectivity, e.g., biotinylated AAV vectors, directed molecular evolution, self-complementary AAV genomes and so on. Modified AAV have also been described, including AAV based on ancestral sequences; see, e.g., U.S. Pat. No. 7,906,111; WO/2005/033321; WO2008/027084, WO2014/124282; WO2015/054653; and WO2007/127264. Other modified AAVs that have been described include chimeric nanoparticles (ChNPs) that have an AAV core that expresses a transgene that is surrounded by layer(s) of acid labile polymers that have embedded antisense oligonucleotides (e.g., see Hong et al., ACS Nano 10:8705-8716 (2016)) and Cho et al., Biomaterials 2012, 33, 3316-3323). The compositions and methods disclosed herein, in some embodiments, provide a platform technology, and as such the composition and methods disclosed herein can be used with all known AAVs, including the modified AAVs described in the literature, such as ChNPs.

[0091] Alternatively, retrovirus vectors and adeno-associated viral vectors can be used as a recombinant gene delivery system for the transfer of gene fragments. These vectors provide efficient delivery of genes into cells, and the transferred nucleic acids are stably integrated into the chromosomal DNA of the host. The development of specialized cell lines (termed “packaging cells”) which produce only replication-defective retroviruses has increased the utility of retroviruses for viral gene therapy, and defective retroviruses are characterized for use in gene transfer for viral gene therapy purposes (for a review see Miller, Blood 76:271 (1990)). A replication defective retrovirus can be packaged into virions, which can be used to infect a target cell through the use of a helper virus by standard techniques. Protocols for producing recombinant retroviruses and for infecting cells in vitro or in vivo with such viruses can be found in Ausubel, et al, eds., Current Protocols in Molecular Biology, Greene Publishing Associates, (1989), Sections 9.10-9.14, and other standard laboratory manuals. Examples of suitable retroviruses include pLJ, pZIP, pWE and pEM which are known to those skilled in the art. Examples of suitable packaging virus lines for preparing both ecotropic and amphotropic retroviral systems include Ψ& ιρ, Ψ&ε, Ψ2 and ΨAΠι. Retroviruses have been used to introduce a variety of genes into many different cell types, including epithelial cells, in vitro and/or in vivo (see for example Eglitis, et al. (1985) Science 230: 1395-1398; Danos and Mulligan (1988) Proc. Natl. Acad. Sci. USA 85:6460-6464; Wilson et al. (1988) Proc. Natl. Acad. Sci. USA 85:3014-3018; Armentano et al. (1990) Proc. Natl. Acad. Sci. USA 87:6141-6145; Huber et al. (1991) Proc. Natl. Acad. Sci. USA 88:8039-8043; Ferry et al. (1991) Proc. Natl. Acad. Sci. USA 88:8377-8381; Chowdhury et al. (1991) Science 254: 1802-1805; van Beusechem et al. (1992) Proc. Natl. Acad. Sci. USA 89:7640-7644; Kay et al. (1992) Human Gene Therapy 3:641- 647; Dai et al. (1992) Proc. Natl. Acad. Sci. USA 89: 10892-10895; Hwu et al. (1993) J. Immunol. 150:4104-4115; U.S. Pat. No. 4,868,116; U.S. Pat. No. 4,980,286; PCT Application WO 89/07136; PCT Application WO 89/02468; PCT Application WO 89/05345; and PCT Application WO 92/07573).

[0092] Another viral gene delivery system useful in the methods of the disclosure utilizes adenovirus-derived vectors. The genome of an adenovirus can be manipulated, such that it encodes and expresses a gene product of interest but is inactivated in terms of its ability to replicate in a normal lytic viral life cycle. See, for example, Berkner et al., BioTechniques 6:616 (1988); Rosenfeld et al., Science 252:431-434 (1991); and Rosenfeld et al., Cell 68: 143-155 (1992). Suitable adenoviral vectors derived from the adenovirus strain Ad type 5 d1324 or other strains of adenovirus (e.g., Ad2, Ad3, or Ad7 etc.) are known to those skilled in the art. Recombinant adenoviruses can be advantageous in certain circumstances, in that they are not capable of infecting non-dividing cells and can be used to infect a wide variety of cell types, including epithelial cells (Rosenfeld et al., (1992) supra). Furthermore, the virus particle can be relatively stable and amenable to purification and concentration, and as above, can be modified so as to affect the spectrum of infectivity. Additionally, in some cases, introduced adenoviral DNA (and foreign DNA contained therein) is not integrated into the genome of a host cell but remains episomal, thereby avoiding potential problems that can occur as a result of insertional mutagenesis in situ, where introduced DNA becomes integrated into the host genome (e.g., retroviral DNA). Moreover, the carrying capacity of the adenoviral genome for foreign DNA can be large (up to 8 kilobases) relative to other gene delivery vectors (Berkner et al., supra; Haj-Ahmand and Graham, J. Virol. 57:267 (1986). Alphaviruses can also be used.

[0093] Alphaviruses are enveloped single stranded RNA viruses that have a broad host range, and when used in the methods disclosed herein alphaviruses can provide high-level transient gene fragment expression. Exemplary alphaviruses include the Semliki Forest virus (SFV), Sindbis virus (SIN) and Venezuelan Equine Encephalitis (VEE) virus, all of which have been genetically engineered to provide efficient replication-deficient and -competent expression vectors. Alphaviruses exhibit significant neurotropism, and so are useful for CNS- related diseases. See, e.g., Lundstrom, Viruses. 2009 June; 1(1): 13-25; Lundstrom, Viruses. 2014 June; 6(6): 2392-2415; Lundstrom, Curr Gene Ther. 2001 May; 1(1): 19- 29; Rayner et al., Rev Med Virol. 2002 September-October; 12(5):279-96.

[0094] Gamma-retroviral vectors (replication competent or defective) can also be used (e.g., MLV). Typical constructs include viruses with a viral genome comprising viral genes (e.g., gag, pol, env) having an expression cassette located in the LTRs or downstream of the envelope gene.

[0095] The frequency of observing any particular tag (gene fragment) before and after phenotypic selection can be a parameter measured using the screening methods disclosed herein. After cloning, the distribution of cloned oligos in the pooled library can be assessed using Next-Generation Sequencing (NGS). In some cases, high throughput sequencing is then used to track the abundance of each gene fragment as the target cells grow. Gene fragments which significantly deplete over the course of cell growth are deleterious to cell fitness and can then be synthesized individually to measure their performance in additional assays, such as cell proliferation, RNA-Seq, Mass Spec, etc.

[0096] As exemplified in the studies presented herein, the screening methodology of the disclosure allowed for the identification of highly effective dominant negative inhibitors of oncogene mediated cancer cell proliferation and viral entry. Because the library of gene fragments can be user defined and custom synthesized, the screening methods disclosed herein are easily adaptable to diverse projects where a selection strategy can be devised to enrich or deplete cells with the phenotype of interest. Technologies which can partition cells based on unique phenotypic features such as Flow Activated Cell Sorting (FACS), or magnetic bead pull down will play a key role in expanding this methodology beyond proliferation. This combined with the decreasing cost of single cell RNA sequencing allows for investigation of increasingly more complex phenotypes, such as cellular differentiation and regeneration. Dominant negative peptides have immense potential as both research tools and therapeutics. Direct inhibition of protein activity without genetic alteration opens unique screening avenues with which to probe protein function. For example, one of the dominant negative fragments identified in the studies presented herein appears selective to a specific KRAS mutation, potentially allowing for mutant allele specific inhibition in a functional screen. Furthermore, with minimal engineering, a dominant negative peptide EGFR inhibitor opposed TNBC cell growth in vitro as effectively as FDA approved small molecules. Because one of the key limitations of dominant negative peptide inhibitors can be the intracellular location of the target proteins, it is expected that advances in biologics delivery can improve the translational relevance this strategy.

[0097] In concert with direct oncological applications, the screening methodologies disclosed herein could be potentially used to identify peptides which are immunostimulatory/immunosuppressive via FACS based screening of immune effector cells. The design of the experiment could be tailored specifically to the pathogenic context (e.g., screening in regulatory T cells to identify immunosuppressive peptides to treat autoimmune disorders). Furthermore, the screening methodologies disclosed herein could also be adapted to inhibiting pathogenic protein-protein interactions directly, such as neurodegenerative tauopathies.

[0098] As such, the disclosure further provides the following applications which can utilize the screening methodologies described herein, including, but not limited to, profiling MHC binding peptides; disrupting pathogenic protein aggregation relevant to tauopathies, amyloid plaques etc.; cytokine/receptor engineering or profiling relevant to cancer immunotherapy as well as autoimmune disorders; identifying peptides mediating regenerative phenotypes such as angiogenesis; discovering anti-aging therapeutics; and discovering pain modulating peptides.

[0099] The disclosure provides a number of drug-like peptides in the accompanying sequence listing (incorporated herein by reference) that can have biological activity in various cancer and disease models. The disclosure thus provides peptides comprising, consisting essentially of or consisting of sequences that are at least 85, 87, 90, 92, 94, 95, 98, 99 or 100% identical to any one of the sequences set forth in the accompanying sequence listing at SEQ ID NOs:1-9488 or 9489). Moreover, it should be recognized that the peptides of the disclosure can have 1-30 additional amino acids appended to the N- or C-terminal end of the peptide (e.g., CPPs, linkers, purification sequences etc.). These drug-like peptide can be delivered to a subject or cell to treat cancer or disease progression by inhibiting the biological activity of the corresponding full length polypeptide from which the peptides are derived. For example, two drug-like peptides (RAF1_73 and EGFR_697) are exemplified that opposed triple-negative breast cancer cell growth in vitro as effectively as some FDA approved small molecules. Because peptide drugs are often limited by the intracellular location of the target proteins, advances in biologics delivery will drastically improve the translational relevance of this strategy.

[0100] The disclosure provides drug-like peptides (e.g., dominant negative peptides) as set forth in Table 1. The dominant negative peptides can be used to treat cell proliferative disorders (e.g., such as those in the same row as the peptide sequence) where the cell proliferative disorder can be caused by or associated with the biological activity of the gene product.

TABLE 1

| | | | Drug-like |
|---|---|---|---|
| Parental | Exemplary | Parental | peptides |
| Gene/Protein Name | Disease/Disorder/Cancer | (SEQ ID NO) * | (SEQ ID NOs) |
| AKT1 (synonyms: | ductal carcinoma, | 9540 | 1-5, 5000-5010 |
| PKB-ALPHA, RAC, | lung adenocarcinoma, | | |
| PRKBA, PKB, | colon adenocarcinoma, | | |
| RAC-ALPHA, | endometrial endometrioid | | |
| CWS 6) | adenocarcinoma, and | | |
| | invasive breast carcinoma | | |
| AR (androgen receptor; | prostate adenocarcinoma, | 9542 | 3499, 3750-3759, |
| synonyms: KD, | lung adenocarcinoma, | | 5011-5073 |
| NR3C4, DHTR, | colon adenocarcinoma, | | |
| AR8, HYSP1, | endometrial endometrioid | | |
| TFM, AIS, SMAX1, | adenocarcinoma, and breast | | |
| SBMA, HUMARA) | invasive ductal carcinoma | | |
| ARAF (synonyms: | lung adenocarcinoma, | 9544 | 5074-5084 |
| RAFA1, A-RAF, | colon adenocarcinoma, | | |
| ARAF1, PKS2) | endometrial endometrioid | | |
| | adenocarcinoma, breast invasive | | |
| | ductal carcinoma, and high grade | | |
| | ovarian serous adenocarcinoma | | |
| BRAF (synonyms: | colon adenocarcinoma, | 9546 | 6-15, 350-489, |
| RAFB1, BRAF1, | cutaneous melanoma, | | 2555-2586, 2949-2974, |
| NS7, B-raf, B-RAF1) | lung adenocarcinoma, | | 3500-3509, 3760-3792, |
| | melanoma, and thyroid gland | | 5086-5185 |
| | papillary carcinoma, | | |
| | colorectal adenocarcinoma, | | |
| | breast invasive ductal carcinoma, | | |
| | melanoma, prostate adenocarcinoma | | |
| CASP8 | Breast and ovarian cancer | 9548 | 490-498, 2587-2588, |
| | | | 2975-2981, 3511, |
| | | | 3793-3804, 5186-5228 |
| CCND1 | breast invasive ductal carcinoma, | 9550 | 5229-5250 |
| (synonyms: | invasive breast carcinoma, bladder | | |
| BCL1, D11S287E, | urothelial carcinoma, breast invasive | | |
| U21B31, PRAD1) | lobular carcinoma, and lung | | |
| | adenocarcinoma | | |
| CDH1 (cadherin-1; | lobular breast carcinoma | 9552 | 499-514, 2589-2591, |
| synonyms: CAM120/80, | | | 2982, 3511, 3805- |
| E-cadherin, uvomorulin) | | | 3816, 5251-5310 |
| CDKN2A (cyclin-dependent | lung adenocarcinoma, | 9554 | 515-517 |
| kinase inhibitor 2A; | conventional glioblastoma | | |
| synonyms: MLM, P19, CDK4I, | multiforme, pancreatic | | |
| MTS1, P19ARF, CDKN2, P16, | adenocarcinoma, cutaneous melanoma, | | |
| CMM2, P14, TP16, P16INK4A, | and bladder urothelial carcinoma | | |
| P16INK4, ARF, MTS-1, INK4, | | | |
| INK4A, P16-INK4A, P14ARF) | | | |
| CHEK2 (checkpoint | Breast cancer, ovarian cancer, | 9556 | 518-592, 2592-2609, |
| kinase 2; synonyms: | colorectal cancer, prostate cancer, | | 2983-3009, 3443-3444, |
| CDS1, CHK2, LFS2, RAD53, | thyroid cancer, osteosarcoma | | 3512-3514, 3817-3859, |
| hCds1, HuCds1, PP1425) | | | 5311-5450 |
| CTNNB1 (catenin beta-1; | lung adenocarcinoma, endometrial | 9558 | 16-27, 593-636, |
| synonyms: armadillo, | endometrioid adenocarcinoma, colon | | 2610-2629, 3010-3039, |
| EVR7, CTNNB, MRD19) | adenocarcinoma, hepatocellular carcinoma, | | 3860-3862, 5451-5502 |
| | and prostate adenocarcinoma | | |
| DDX3X (DEAD-box | Liver cancer, | 9560 | 637-645, 2630-2634, |
| helicase 3 X-linked; | medulloblastoma | | 3040-3042, 3863-3878, |
| synonyms: DBX, DDX3, HLP2, | | | 5503-5582 |
| DDX14, CAP-Rf, MRX102) | | | |
| DICER1 | Ovarian cancer, lung cancer, | 9562 | 28-32, 646-671, |
| (synonyms: DCR1, | testicular cancer, thyroid | | 2635-2639, 3043-3059, |
| GLOW, MNG1, Dicer, | cancer, Wilms tumour, stomach | | 3445-3447, 3515-3532, |
| HERNA, RMSE2, | cancer, bladder cancer, skin | | 3879-3941, 5583-5863 |
| Dicerle, K12H4.8-LIKE) | cancer, lung cancer, eye cancer | | |
| EGFR | lung adenocarcinoma, | 9564 | 33-49, 672-725, |
| (epithelial growth | conventional glioblastoma | | 2640-2655, 3060-3082, |
| factor receptor; | multiforme, breast | | 3448, 3533-3536, |
| synonyms: ERBB, | invasive ductal carcinoma, | | 3942-3973, 5864-5934 |
| HER1, mENA, | glioblastoma, and | | |
| NISBD2, PIG61, ERBB1) | colon adenocarcinoma | | |
| EP300 (histone | lung adenocarcinoma, | 9566 | 50-59, 726-736, |
| acetyltransferase | colon adenocarcinoma, | | 2656-2660, 3083-3105 |
| p300; synonyms: | bladder urothelial carcinoma, | | |
| KAT3B, RSTS2, p300) | breast invasive ductal | | |
| | carcinoma, and endometrial | | |
| | endometrioid adenocarcinoma | | |
| ERBB2 (receptor | breast invasive ductal carcinoma, | 9568 | 60, 737-742, |
| tyrosine-protein kinase | lung adenocarcinoma, colon | | 2661-2662, 3106-3107, |
| erbB-2; synonyms: HER-2, | adenocarcinoma, bladder urothelial | | 3537-3538, 3974-3985, |
| CD340, NEU, | carcinoma, and invasive breast | | 5935-5980 |
| “MLN 19”, NGL, | carcinoma | | |
| TKR1, HER-2/neu, HER2) | | | |
| ERBB3 (receptor | colon adenocarcinoma, | 9570 | 743-745, 3539-3544, |
| tyrosine-protein kinase | breast invasive | | 3986-3998, 5981-6064 |
| erbB-3; synonyms: | ductal carcinoma, | | |
| erbB3-S, LCCS2, | bladder urothelial | | |
| p85-sErbB3, c-erbB3, | carcinoma, lung adenocarcinoma, | | |
| HER3, MDA-BF-1, | and endometrial endometrioid | | |
| p180-ErbB3, ErbB-3, | adenocarcinoma | | |
| c-erbB-3, p45-sErbB3) | | | |
| ERBB4 (ERBB4 | lung adenocarcinoma, | 9572 | 746-751, 2663, |
| intracellular | colon adenocarcinoma, | | 3108-3110, 3449-3451, |
| domain; synonyms: | cutaneous melanoma, | | 3545-3548, 3999-4047, |
| p180erbB4, | melanoma, and breast | | 6065-6180 |
| ALS19, HER4) | invasive ductal carcinoma | | |
| FBXW7 (F-box/WD | colon adenocarcinoma, | 9574 | 752-812, 2664-2668, |
| repeat-containing | rectal adenocarcinoma, lung | | 3111-3125, 3549, |
| protein 7; | adenocarcinoma, colorectal | | 4048-4061, 6181-6251 |
| synonyms: SEL-10, | adenocarcinoma, and | | |
| FEW6, hAgo, CDC4, FBX30, | endometrial endometrioid | | |
| FBW7, FBXO30, hCdc4, | adenocarcinoma | | |
| SEL10, FBXW6, AGO) | | | |
| FGFR2 | endometrial endometrioid | 9576 | 813-819, 2669-2671, |
| (fibroblast growth | adenocarcinoma, breast | | 3126-3130, 4062-4075, |
| factor receptor 2; | invasive ductal carcinoma, | | 6252-6310 |
| synonyms: BEK, | colon adenocarcinoma, lung | | |
| CFD1, TK25, KGFR, BBDS, | adenocarcinoma, and | | |
| TK14, BFR-1, JWS, CEK3, | cutaneous melanoma | | |
| K-SAM, ECT1, CD332) | | | |
| FGFR3 | bladder urothelial carcinoma, | 9578 | 820-824, 6311-6323 |
| (fibroblast growth | colon adenocarcinoma, lung | | |
| factor receptor 3; | adenocarcinoma, breast invasive | | |
| synonyms: CD333, | ductal carcinoma, and infiltrating | | |
| HSFGFR3EX, | renal pelvis and ureter urothelial | | |
| JTK4, CEK2, ACH) | carcinoma | | |
| FLT3 (receptor-type | colon adenocarcinoma, | 9580 | 825-855, 2672-2678, |
| tyrosine-protein kinase | acute myeloid leukemia, | | 3131, 3550-3572, |
| FLT3; synonyms: | lung adenocarcinoma, | | 4076-4106, 6324-6471 |
| FLK-2, FLK2, | breast invasive ductal carcinoma, | | |
| CD135, STK1) | and cutaneous melanoma | | |
| GFP | | 9582 | 856-858 |
| GNA11 (guanine | uveal melanoma, | 9584 | 859-863, 3132, |
| nucleotide-bindign protein | colon adenocarcinoma, lung | | 4107, 6472-6481 |
| subunit alpha-11; | adenocarcinoma, breast invasive | | |
| synonyms: FBH, GNA-11, | ductal carcinoma, and high grade | | |
| FBH2, HYPOC2, HHC2, FHH2) | ovarian serous adenocarcinoma | | |
| GNAQ (guanine | uveal melanoma, lung | 9586 | 61-63, 864-866, |
| nucleotide-bindign | adenocarcinoma, | | 2679-2682, 3133-3136, |
| protein G (q) subunit | colon adenocarcinoma, | | 6482-6510, |
| alpha; synonyms: GAQ, | melanoma, and | | |
| G-ALPHA-q, CMC1, SWS) | bladder urothelial carcinoma | | |
| HPRT1 | Skin cancer, bladder | 9588 | 64-65, 867-875, |
| (hypoxanthine-guanine | cancer, cervical | | 2683, 3137-3146, |
| phosphoribosyltransferase; | cancer, Wilms Tumour | | 4108, 6511-6525, |
| synonyms: HPRT, HGPRT) | | | |
| HRAS (GTPase HRas, | bladder urothelial carcinoma, | 9590 | 876-894, 2684, |
| N-terminally processed; | myelodysplastic syndromes, breast | | 3147-3149, 6526-6527, |
| synonyms: HRAS1, C-H-RAS, | invasive ductal carcinoma, acute | | |
| C-BAS/HAS, H-RASIDX, CTLO, | myeloid leukemia, and lung | | |
| RASH1, p21ras, HAMSV, C-HA-RAS1) | adenocarcinoma | | |
| IDH1 (isocitrate | oligodendroglioma, anaplastic | 9592 | 895-905, 3150-3152, |
| dehydrogenase (NADP) | astrocytoma, astrocytoma, acute | | 4109, 6528-6557 |
| cytoplasmic; synonyms: IDP, | myeloid leukemia, and conventional | | |
| IDCD, HEL-216, IDE, | glioblastoma multiforme | | |
| HEL-S-26, PICD, IDPC) | | | |
| IDH2 (isocitrate | acute myeloid leukemia, breast | 9594 | 66-69, 899-905, |
| dehydrogenase (NADP), | invasive ductal carcinoma, colon | | 4110-4111, 6558-6571 |
| mitochondrial; synonyms: IDP, | adenocarcinoma, lung | | |
| IDEM, IDE, ICD-M, | adenocarcinoma, and | | |
| mNADP-IDH, IDPM, D2HGA2) | myelodysplastic syndromes | | |
| KEAP1 (Kelch-like | lung adenocarcinoma, squamous cell lung | 9596 | 906-921, 2685, |
| ECH-associated | carcinoma, non-small cell lung carcinoma, | | 3153-3156, 4112, |
| protein 1; synonyms: | cancer of unknown primary, and colon | | 6572-6582 |
| INrf2, KLHL19) | adenocarcinoma | | |
| KIT (mast/stem cell growth | gastrointestinal stromal tumor, | 9598 | 70-73, 922-950, |
| factor receptor Kit; synonyms: | lung adenocarcinoma, colon | | 2686-2703, 3157-3184, |
| SCFR, C-Kit, MASTC, | adenocarcinoma, conventional glioblastoma | | 3573-3574, 4113-4127, |
| PBT, CD117) | multiforme, and melanoma | | 6583-6707 |
| KMT2C (histone-lysine | breast invasive ductal carcinoma, | 9600 | 951-961, 3185 |
| N-methyltransferase 2C; | lung adenocarcinoma, | | |
| synonyms: HALR, | colon adenocarcinoma, | | |
| KLEFS2, MLL3) | prostate adenocarcinoma, and | | |
| | cutaneous melanoma | | |
| KRAS (MAP | lung adenocarcinoma, | 9602 | 962-1052, 2704-2721, |
| kinase signaling) | colon adenocarcinoma, | | 3186-3198, 3452, |
| | pancreatic adenocarcinoma, | | 3575-3579, 4128-4158, |
| | colorectal adenocarcinoma, and | | 6708-6753 |
| | rectal adenocarcinoma | | |
| KRAS4B (MAP | lung adenocarcinoma, | 9604 | 4159-4167, 6754-6805 |
| kinase signaling 4B) | colon adenocarcinoma, | | |
| | pancreatic adenocarcinoma, | | |
| | colorectal adenocarcinoma, and | | |
| | rectal adenocarcinoma | | |
| MAP2K1 (dual specificity | cutaneous melanoma, | 9606 | 74, 1053-1059, |
| mitgen-activated | colon adenocarcinoma, lung | | 2722, 3199-3202, |
| protein kinase | adenocarcinoma, | | 3580, 4168-4180, |
| kinase 1; synonyms: | bladder urothelial carcinoma, and | | 6806-6848 |
| MAPKK1, PRKMK1, | breast invasive ductal carcinoma | | |
| CFC3, MEK1, MKK1) | | | |
| MAX (MYC | Colorectal cancer, breast cancer, prostate | 9608 | 6849-6851 |
| associated factor X) | cancer, lung cancer, liver cancer | | |
| MDM2 (E3 | lung adenocarcinoma, breast invasive | 9610 | 3453-3455, 3581-3588, |
| ubiquitin- | ductal carcinoma, dedifferentiated | | 4181-4221, 6852-6939 |
| protien ligase | liposarcoma, bladder | | |
| Mdm2; synonyms: | urothelial carcinoma, and | | |
| HDMX, ACTFS, hdm2) | conventional glioblastoma multiforme | | |
| MDM4 (synonyms: | breast invasive ductal carcinoma, | 9612 | 3589-3595, 4222-4262, |
| HDMX, MRP1, | lung adenocarcinoma, conventional | | 6940-7052 |
| MDMX) | glioblastoma multiforme, glioblastoma, | | |
| | and prostate adenocarcinoma | | |
| MET (hepatocyte | lung adenocarcinoma, colon | 9614 | 75, 1060-1071, |
| growth factor receptor; | adenocarcinoma, cutaneous melanoma, | | 2723-2729, 3203-3216, |
| synonyms: c-Met, DFNB97, | melanoma, and conventional | | 3456-3457, 3596-3600, |
| RCCP2, HGFR, AUTS9) | glioblastoma multiforme | | 4263-4297, 7053-7273 |
| MTOR | lung adenocarcinoma, colon | 9616 | 76-77, 1072-1080, |
| (serine/threonine-protein | adenocarcinoma, endometrial endometrioid | | 3458, 3601, |
| kinase mTOR; synonyms: | adenocarcinoma, breast invasive | | 4298-4311, 7274-7379 |
| RAPT1, FRAP2, FRAP, | ductal carcinoma, and bladder | | |
| FRAP1, RAFT1, SKS) | urothelial carcinoma | | |
| MYC (Myc prot-oncogene | breast invasive ductal carcinoma, | 9618 | 4312-4317, 7380-7409 |
| protein; synonyms: | lung adenocarcinoma, prostate | | |
| MRTL, MYCC, bHLHe39, | adenocarcinoma, colon adenocarcinoma, | | |
| c-Myc) | and high grade ovarian serous | | |
| | adenocarcinoma | | |
| MYCL (synonyms: | bladder urothelial carcinoma, | 9620 | 4318, 7410-7426 |
| bHLHe38, LMYC, | breast invasive ductal | | |
| L-Myc, MYCL1) | carcinoma, high | | |
| | grade ovarian serous | | |
| | adenocarcinoma, | | |
| | small cell lung carcinoma, | | |
| | and lung adenocarcinoma | | |
| MYCN (N-myc | neuroblastoma, conventional | 9622 | 3602, 4319-4327, |
| proto-oncogene | glioblastoma multiforme, breast | | 7427-7453 |
| protein; | invasive ductal carcinoma, bladder | | |
| synonyms: N-myc, ODED, | urothelial carcinoma, and | | |
| MODED, bHLHe37, NMYC) | anaplastic astrocytoma | | |
| NCOA3 (nuclear | breast invasive ductal carcinoma, | 9624 | 3603, 4328-4378, |
| receptor | colon adenocarcinoma, | | 7454-7618 |
| coactivator 3) | rectal adenocarcinoma, lung | | |
| | adenocarcinoma, and mixed lobular | | |
| | and ductal breast carcinoma | | |
| NFE2L2 (nuclear | squamous cell lung carcinoma, | 9626 | 1081-1183, 2730-2740, |
| factor erythroid | lung adenocarcinoma, | | 3217-3221, 3459-3460, |
| 2-related factor | endometrial endometrioid | | 3604-3634, 4379-4430, |
| 2; synonyms: | adenocarcinoma, | | 7619-7694 |
| HEBP1, NRF2, IMDDHH) | bladder urothelial | | |
| | carcinoma, and colon | | |
| | adenocarcinoma | | |
| NKX2 | Lung cancer, adenocarcinomas, | 9628 | 4431-4435, 7695-7712 |
| | thyroid cancer | | |
| NOTCH1 | colon adenocarcinoma, lung | 9630 | 1184-1187, 4436, |
| (synonyms: | adenocarcinoma, breast invasive | | 7713-7752 |
| AOVD1, TAN1, | ductal carcinoma, endometrial | | |
| AOS5, hN1) | endometrioid adenocarcinoma, and | | |
| | bladder urothelial carcinoma | | |
| NRAS (GTPase NRas; | cutaneous melanoma, melanoma, colon | 9632 | 1188-1197, 2741-2747, |
| synonyms: ALPS4, NRAS1, | adenocarcinoma, acute myeloid leukemia, | | 3222-3225, 4437-4444, |
| NS6, CMNS, NCMS, N-ras) | and lung adenocarcinoma | | 7753-7771 |
| OMOMYC | breast invasive ductal carcinoma, | 9634 | 4445-4447, 7772-7782 |
| (dominant | lung adenocarcinoma, prostate | | |
| negative of Myc) | adenocarcinoma, colon | | |
| | adenocarcinoma, and high grade | | |
| | ovarian serous adenocarcinoma | | |
| PIK3CA | breast invasive ductal carcinoma, | 9636 | 78-111, 1198-1273, |
| (Phosphatidylinositol | colon adenocarcinoma, lung | | 2748-2788, 3226-3254, |
| 4,5-bisphosphate 3-kinase | adenocarcinoma, endometrial | | 3461-3463, 3635-3650, |
| catalytic subunit alpha | endometrioid adenocarcinoma, and | | 4448-4565, 7783-8035 |
| isoform; Synonyms: | breast invasive lobular carcinoma | | |
| PI3K, MCM, p110-alpha, | | | |
| MCAP, CLOVE, MCMTC, | | | |
| PI3K-alpha, CWS5) | | | |
| PIK3R1 | endometrial endometrioid | 9638 | 112-151, 1274-1308, |
| (phosphatidylinositol | adenocarcinoma, colon | | 2789-2825, 3255-3279, |
| 3-kinase regulatory | adenocarcinoma, breast invasive | | 3651-3655, 4566-4608, |
| subunit alpha; | ductal carcinoma, conventional | | 8036-8180 |
| synonyms: IMD36, AGM7, | glioblastoma multiforme, and lung | | |
| GRB1, p85-ALPHA, p85) | adenocarcinoma | | |
| PPP2R1A | endometrial serous adenocarcinoma, | 9640 | 152-153, 1309-1329, |
| (Serine/threonine-protein | breast invasive ductal carcinoma, | | 2826, 3280-3287, |
| phosphatase 2A | colon adenocarcinoma, lung | | 3656, 8181-8201 |
| 65 kDa regulatory | adenocarcinoma, and | | |
| subunit A alpha | endometrial endometrioid | | |
| isoform; synonyms: | adenocarcinoma | | |
| MRD36, PP2A-Aalpha, PP2AA, | | | |
| PP2AAALPHA, PR65A) | | | |
| PTPN11 (Tyrosine-protein | acute myeloid leukemia, lung | 9642 | 154-171, 1330-1385, |
| phosphatase non-receptor | adenocarcinoma, conventional | | 2827-2840, 3288-3301, |
| type 11; synonyms: SH-PTP3, | glioblastoma multiforme, colon | | 3464, 3657, 4609-4626, |
| JMML, SHP2, PTP-1D, | adenocarcinoma, and | | 8202-8310 |
| BPTP3, CFC, NS1, SH-PTP2, | glioblastoma | | |
| PTP2C, METCDS) | | | |
| RAB25 (Ras-related | Breast cancer, colorectal | 9644 | 4627, 8311-8313 |
| protein 25) | adenocarcinoma and | | |
| | esophageal cancer | | |
| RAC1 (Ras-related | Melanoma and non-small | 9646 | 172, 1386-1412, |
| C3 botulinum toxin | cell lung cancer | | 2841-2845, 3302-3313, |
| substrate 1) | | | 3658-3661, 4628-4640, |
| | | | 8314-8339 |
| RAF1 (RAF proto-oncogene | colon adenocarcinoma, bladder | 9648 | 3465-3467, 4641-4654, |
| serine/threonine-protein | urothelial carcinoma, lung | | 8340-8403 |
| kinase; synonyms: Raf-1, | adenocarcinoma, cutaneous melanoma, | | |
| | and breast invasive | | |
| C-Raf, NS5, CMD1NN, CRAF) | ductal carcinoma | | |
| RASA1 (RAS p21 | Basal cell carcnoma | 9650 | 1413-1417, 3314, |
| protein activator 1) | | | 3468-3491, 3662-3674, |
| | | | 4655-4738, 8404-8620 |
| RB1 | lung adenocarcinoma, | 9652 | 1418-1424, 2846-2856, |
| (retinoblastoma-associated | breast invasive ductal carcinoma, | | 3315-3321, 3492-3494, |
| protein; synonyms: | small cell lung carcinoma, bladder | | 3675-3713, 4739-4823, |
| PPP1R130, pRb, OSRC, RB, | urothelial carcinoma, and colon | | 8621-8861 |
| p105-Rb, pp110) | adenocarcinoma | | |
| RHEB (GTP-bindign | lung adenocarcinoma, | 9654 | 1425-1432, 2857-2858, |
| protein Rheb; RHEB2) | colon adenocarcinoma, | | 3322-3329, 4824-4829, |
| | breast invasive ductal carcinoma, | | 8862-8901 |
| | prostate adenocarcinoma, and | | |
| | endometrial endometrioid | | |
| | adenocarcinoma | | |
| RHOA (Ras homolog family | Breast cancer, lung cancer, liver | 9656 | 173-175, 1433-1508, |
| member A; synonyms: ARHA, | cancer, ovarian cancer, bladder | | 2859-2872, 3330-3384, |
| ARH12, RHO12, RHOH12) | cancer | | 4830-4833, 8902-8924 |
| RRAS2 (related RAS viral | Oral cancer, esophageal cancer, | 9658 | 1509-1514, 3495, |
| oncogene homolog 2) | stomach cancer, skin cancer, | | 3714-3725, 4834-4845, |
| | breast cancer, lymphomas | | 8925-8949 |
| RUNX1 (runt-related | breast invasive ductal carcinoma, | 9660 | 1515-1518, 2873, |
| transcription factor 1; | acute myeloid leukemia, | | 4846-4850, 8950-8966 |
| synonyms: AML1-EVI-1, | myelodysplastic syndromes, lung | | |
| CBFA2, CBF2alpha, | adenocarcinoma, and breast | | |
| PEBP2alpha, AML1, AMLCR1, | invasive lobular carcinoma | | |
| PEBP2aB, EVI-1) | | | |
| SETD2 (histone-lysine | lung adenocarcinoma, clear cell renal | 9662 | 176-179, 1519-1532, |
| N-methyltransferase | cell carcinoma, colon adenocarcinoma, | | 2874-2878, 3385-3393 |
| SETD2; synonyms: LLS, | breast invasive ductal | | |
| HIP-1, HIF-1, HYPB, p231HBP, | carcinoma, and endometrial | | |
| KMT3A, HSPC069, SET2, HBP231) | endometrioid adenocarcinoma | | |
| SF3B1 (splicing factor 3B | breast invasive ductal carcinoma, | 9664 | 180-204, 1533-1589, |
| subunit 1; synonyms: | lung adenocarcinoma, | | 2879-2891, 3394-3410, |
| SF3b155, PRP10, | colon adenocarcinoma, | | 3496-3498, 3726-3731, |
| Hsh155, SAP155, | myelodysplastic syndromes, and | | 4851-4922, 8967-9148 |
| PRPF10, MDS) | bladder urothelial carcinoma | | |
| SKP2 (S-phase | Breast cancer, lung | 9666 | 4923-4931, 9149-9182 |
| kinase associate d | cancer, prostate cancer, liver | | |
| protein 2; synonyms: p45, | cancer, Ewing's Sarcoma, | | |
| FBL1, FLB1, FBXL1) | skin cancer | | |
| SMAD2 (SMAD | Colorectal cancer, breast cancer, | 9668 | 1590-1591, 2892, |
| family member 2; | lung cancer, pancreatic | | 3732-3733, 4932-4937, |
| synonyms: JV18, MADH2, MADR2, | cancer, uterine sarcoma, | | 9183-9228 |
| JV18-1, hMAD-2, hSMAD2) | bladder cancer, eye cancer | | |
| SMAD4 (SMAD | Pancreatic cancer, colorectal cancer, | 9670 | 205-207, 1592-1795, |
| family member 4; | breast cancer, stomach cancer, | | 2893-2911, 3411-3426, |
| synonyms: JIP, DPC4, | lung cancer, liver cancer, adenomatous | | 3734-3745, 4938-4959, |
| MADH4, MYHRS) | polyposis coli, cervical cancer | | 9229-9288 |
| SPOP (Speckle-type | prostate, lung, colon, gastric, | 9672 | 208, 1796-1804, |
| BTB/POZ; synonyms: | kidney and liver cancers | | 2912-2913, 3427 |
| BTBD32, TEF2, | | | |
| speckle type BTB/POZ | | | |
| protein, NEDMIDF, NSDVS1, | | | |
| NSDVS2, NEDMACE) | | | |
| TERT | lung adenocarcinoma, | 9674 | 4960-4976, 9289-9390 |
| (telomerase reverse | colon adenocarcinoma, | | |
| transcriptase; | breast invasive ductal carcinoma, | | |
| synonyms: PFBMFT1, TCS1, | cutaneous melanoma, and | | |
| hTRT, hEST2, CMM9, DKCB4, | conventional glioblastoma | | |
| DKCA2, EST2, TRT, TP2) | multiforme | | |
| TGFBR2 | colon adenocarcinoma, lung | 9676 | 1805, 3746-3749, |
| | adenocarcinoma, pancreatic | | 4977-4988, 9391-9417 |
| | adenocarcinoma, cutaneous melanoma, | | |
| | and breast invasive ductal carcinoma | | |
| TP53 (cellular tumor antigen | lung adenocarcinoma, breast invasive | 9678 | 209-341, 1806-2482, |
| p53; synonyms: BCC7, TRP53, | ductal carcinoma, colon adenocarcinoma, | | 2914-2943, 3428-3439, |
| P53, LFS1) | pancreatic adenocarcinoma, and | | 4989-4990, 9418-9432 |
| | colorectal adenocarcinoma | | |
| VHL (von Hippel-Lindau | clear cell renal cell carcinoma, | 9680 | 342-349, 2483-2553, |
| disease tumor suppressor; | renal cell carcinoma, lung | | 2944-2948, 3440-3442, |
| synonyms: RCA1, | adenocarcinoma, breast invasive | | 4991-4997, 9433-9440 |
| VHL1, HRCA1, pVHL) | ductal carcinoma, and bladder | | |
| | urothelial carcinoma | | |
| YAP1 (transcription | breast invasive ductal carcinoma, lung | 9682 | 4998-4999, 9441-9459 |
| coactivator YAP1; synonyms: | adenocarcinoma, bladder urothelial | | |
| YAP, YAP2, YAP65, COB1, YKI) | carcinoma, cutaneous melanoma, and head | | |
| | and neck squamous cell carcinoma | | |
| ZFP36L2 (zinc | Colorectal cancer, ovarian cancer, | 9684 | 2554 |
| finger protein | endometrial cancer, skin cancer, | | |
| 36 ring finger | testicular cancer, urothelial cancer, | | |
| protein-like 2) | pancreatic cancer and liver cancer | | |
| ACE2 | serves as the entry point for some | 9686 | 9460-9470 |
| (angiotensin-converting | coronaviruses, including HCoV-NL63, | | |
| enzyme 2) | SARS-CoV, and SARS-CoV-2 | | |
| ACE1 | serves as the entry point for some | 9688 | 9471-9472, 9489 |
| (angiotensin-converting | coronaviruses, including HCoV-NL63, | | |
| enzyme 1) | SARS-CoV, and SARS-CoV-2 | | |
| DPP9 | serves as the entry point for some | 9690 | 9473-9474, 9488 |
| (dipeptidyl peptidase 9) | coronaviruses | | |
| ANPEP (alanine | serves as the entry point for some | 9692 | 9475-9476, 9486 |
| aminopeptidase N) | coronaviruses | | |
| FAP (prolyl | serves as the entry point for some | 9694 | 9477-9478, 9485 |
| endopeptidase FAP) | coronaviruses | | |
| DPP4 | serves as the entry point for some | 9696 | 9479-9480, 9483 |
| (dipeptidyl peptidase 4) | coronaviruses | | |
| Fibronectin | serves as the entry point for some | 9698 | 9481-9482, 9484 |
| | coronaviruses | | |
| DPP8 | serves as the entry point for some | 9700 | 9487 |
| (dipeptidyl peptidase 8) | coronaviruses | | |

* Mutants are also contemplated. As used herein, e.g., “289T” refers to a mutation at position 289, wherein position 289 can be T. Similarly, “782R/V” refers to a mutation at position 782, wherein position 782 can be R or V.

[0101] The disclosure provides, in one embodiment, a comprehensive screening platform which enables the identification of peptide inhibitors of pathological processes. This methodology can be scalable due to the ease of oligonucleotide synthesis, simple to perform, and highly precise, allowing users to interrogate proteins with single amino acid resolution. Because the library of peptide coding gene fragments can be user defined and custom synthesized, this strategy can be easily adaptable to diverse studies where a selection strategy can be devised to enrich or deplete cells with the phenotype of interest. Inhibitory peptides have immense potential as both research tools and therapeutics. Direct inhibition of protein activity without genetic alteration opens unique screening avenues with which to probe protein function. For example, protein-protein interaction networks could be more precisely perturbed via inhibitory peptides contacting a specific protein surface than by complete genetic knockdown. The ability to identify protein regions associated with cell fitness can also serve to complement traditional drug development efforts, such as determining critical residues for inhibition via small molecules or antibodies. Additionally, this screening resource identifies inhibitory peptides that are immediately translatable, bypassing the need for additional high-throughput screens to identify candidate molecules. Functionally, peptides can be: 1) readily made cell permeable via coupling of cell penetrating motifs to enable drug-like function; or alternatively, 2) coupled to chemical moieties such as poly-ethylene glycol (PEG) or protein domains with naturally long serum half-life such as Fc, transferrin or albumin to improve persistence in circulation. For example, using the methods of the disclosure drug-like peptides were generated that opposed triple-negative breast cancer cell growth in vitro as effectively as some FDA approved small molecules targeting the same proteins. Advances in biologics delivery will further improve the translational relevance of this strategy. We anticipate a future role for this method of peptide inhibitor screening in both basic research and drug development.

[0102] The peptides of the disclosure (see, e.g., SEQ ID NOs:1-9489) can be delivered to cells or subjects in a number of different ways known to those of skill in the art. For example, the peptides themselves may be formulated for delivery directly or they maybe engineered to comprise delivery molecules to assist in their targeting or uptake. For example, suitable delivery molecules include protein transduction domains (PTDs) (sometimes referred to as cell penetrating peptides (CPPs)), nanoparticles, liposomes etc.

[0103] In other embodiments, the polynucleotide encoding the peptides of the disclosure can be delivered to a cell such that they are “expressed” in the cell and provide their biological effect via the expression of the polynucleotide. Typically such polynucleotides will be operably linked to an expression control sequence (e.g., promoter, enhancer etc.). Depending upon the cell expressing the polynucleotide suitable promoters and/or vectors can be selected such that delivery and expression occur. In some embodiments, the vector used to deliver a polynucleotide encoding a peptide of the disclosure is a viral vector. Such viral vectors can be replication competent or replication defective. The viral vectors whether replication competent or replication defective can be “derived” (e.g., engineered from) any number of viral vector systems known in the art. For example, suitable viral vectors that can be engineered to contain a polynucleotide of the disclosure comprise gammaretroviruses (e.g., MLV), lentivirus, adenoviruses, alphaviruses etc. In some cases, where the viral vector is replication defective a suitable helper cell system is used.

[0104] Replication competent retroviral systems will typically comprise a viral capsid comprising GAG, POL and ENV proteins and a viral genome comprising sequences encoding GAG, POL and ENV as well as factors necessary for the integration and packaging of the viral genome. A cassette is typically engineered into the viral genome, wherein the cassette comprises an IRES, promoter or other regulatory factor upstream of the coding sequence of a peptide of the disclosure. The cassette is typically integrated into the viral genome in a location that does not disrupt expression of necessary viral genes and is typically located downstream of the env coding sequence or in the LTRs of the viral genome.

[0105] As described herein, the disclosure provides peptides that have dominant negative activity and have, for example, anticancer effects. In one embodiment, the peptides inhibit the biological activity of the molecule from which they are derived. By “anticancer effect” means that the molecule inhibits, for example, aberrant proliferative activity, invasiveness, cell growth, migration and any combinations thereof. The disclosure contemplates that the peptides of the disclosure can be delivered in a number of ways.

[0106] Cellular delivery can be accomplished by fusion of “cargo” biological agents (in this case the peptides of the disclosure) to a cationic Peptide Transduction Domain (PTD; also termed Cell Penetrating Peptide (CPP)) such as TAT or (Arge) (Snyder and Dowdy, 2005, Expert Opin. Drug Deliv. 2, 43-51). PTDs can be used to deliver a wide variety of macromolecular cargo, including the peptides described herein. Cationic PTDs enter cells by macropinocytosis, a specialized form of fluid phase uptake that all cells perform.

[0107] The discovery of several proteins which could efficiently pass through the plasma membrane of eukaryotic cells has led to the identification of a class of proteins from which peptide transduction domains have been derived. The best characterized of these proteins are the Drosophila homeoprotein antennapedia transcription protein (AntHD) (Joliot et al., New Biol. 3:1121-34, 1991; Joliot et al., Proc. Natl. Acad. Sci. USA, 88:1864-8, 1991; Le Roux et al., Proc. Natl. Acad. Sci. USA, 90:9120-4, 1993), the herpes simplex virus structural protein VP22 (Elliott and O′Hare, Cell 88:223-33, 1997), the HIV-1 transcriptional activator TAT protein (Green and Loewenstein, Cell 55:1179-1188, 1988; Frankel and Pabo, Cell 55:1189-1193, 1988), and more recently the cationic N-terminal domain of prion proteins. Exemplary PTD sequences are provided in Table 2. The disclosure further provides for one or more of the PTDs listed in Table 2 or other PTDs known in the art (see, e.g., Joliot et al., Nature Cell Biology, 6(3):189-196, 2004) to be conjugated to the peptides disclosed herein. Strategies for conjugation include the use of a bifunctional linker that includes a functional group that can be cleaved by the action of an intracellular enzyme.

TABLE 2

| PTD | Sequence | SEQ ID NO. |
|---|---|---|
| TAT | RKKRRQRRR | SEQ ID NO: 9490 |
| Penetratin | RQIKIWFQNRRMK | SEQ ID NO: 9491 |
| | WKK | |
| Buforin II | TRSSRAGLQFPVG | SEQ ID NO: 9492 |
| | RVHRLLRK | |
| Transportan | GWTLNSAGYLLGKI | SEQ ID NO: 9493 |
| | NKALAALAKKIL | |
| MAP (model | KLALKLALKALKA | SEQ ID NO: 9494 |
| amphipathic | ALKLA | |
| peptide) | | |
| K-FGF | AAVALLPAVLLAL | SEQ ID NO: 9495 |
| | LAP | |
| Ku70 | VPMLK - PMLKE | SEQ ID NO: 9496 |
| Prion | MANLGYWLLALFVT | SEQ ID NO: 9497 |
| | MWTDVGLCKKRPKP | |
| pVEC | LLIILRRRIRKQAH | SEQ ID NO: 9498 |
| | AHSK | |
| Pep-1 | KETWWETWWTEWS | SEQ ID NO: 9499 |
| | QPKKKRKV | |
| SynB1 | RGGRLSYSRRRFST | SEQ ID NO: 9500 |
| | STGR | |
| Pep-7 | SDLWEMMMVSLACQY | SEQ ID NO: 9501 |
| (phage display) | | |
| HN-1 | TSPLNIHNGQKL | SEQ ID NO: 9502 |
| (phage display) | | |

[0108] Exemplary auxiliary moieties that can be conjugated to any of the constructs described herein are provided in Table 3.

TABLE 3
Sequence (N′ to C′)
(PTD = protein transduction domain)

PEG-(PTD)
GG-(PTD)-PEG-(PTD)
PEG-(PTD)-PEG-(PTD)
GG-(PTD)-PEG-PEG-PEG-(PTD)
PEG-(PTD)-PEG-PEG-PEG-(PTD)
GG-(PTD)-PEG-(PTD)-PEG-(PTD)
GG-(PTD)-PEG-PEG-PEG-(PTD)-PEG-PEG-PEG-(PTD)

PEG = poly(ethyleneglycol) linker having two-six repeat units

[0109] In one embodiment, a PTD useful in the methods and compositions of the disclosure comprises a peptide or polypeptide featuring substantial alpha-helicity. It has been discovered that transfection can be optimized when the PTD exhibits significant alpha-helicity. In another embodiment, the PTD comprises a sequence containing basic amino acid residues that are substantially aligned along at least one face of the peptide or polypeptide. A PTD domain useful in the disclosure may be a naturally occurring peptide or polypeptide or a synthetic peptide or polypeptide.

[0110] In another embodiment, the PTD comprises an amino acid sequence comprising a strong alpha helical structure with arginine (Arg) residues down the helical cylinder.

[0111] In yet another embodiment, the PTD domain comprises a peptide represented by the following general formula: B_{P1}-X_{P1}-X_{P2}-X_{P3}-B_{P2}-X_{P4}-X_{P5}-B_{P3} (SEQ ID NO:9503) wherein B_{P1}, B_{P2}, and B_{P3} are each independently a basic amino acid, the same or different; and X_{P1}, X_{P2}, X_{P3}, X_{P4}, and X_{P5} are each independently an alpha-helix enhancing amino acid, the same or different.

[0112] In another embodiment, the PTD domain is represented by the following general formula: B_{P1}-X_{P1}-X_{P2}-B_{P2}-B_{P3}-X_{P3}-X_{P4}-B_{P4} (SEQ ID NO:9504) wherein B_{P1}, B_{P2}, B_{P2}, and B_{P4} are each independently a basic amino acid, the same or different; and X_{P1}, X_{P2}, X_{P3}, and X_{P4} are each independently an alpha-helix enhancing amino acid the same or different.

[0113] Additionally, PTD domains comprise basic residues, e.g., lysine (Lys) or arginine (Arg), and further can include at least one proline (Pro) residue sufficient to introduce “kinks” into the domain. Examples of such domains include the transduction domains of prions. For example, such a peptide comprises KKRPKPG (SEQ ID NO:9505).

[0114] In another embodiment the PTD is cationic and consists of between 7 and 10 amino acids. An example of such a peptide comprises RKKRRQRRR (SEQ ID NO:9490). In another example, the PTD is a cationic peptide sequence having 5-10 arginine (and/or lysine) residues over 5-15 amino acids.

[0115] Additional delivery domains in accord with this disclosure include a TAT fragment that comprises at least amino acids 49 to 56 of TAT up to about the full-length TAT sequence (see, e.g., SEQ ID NO:9490). A TAT fragment may include one or more amino acid changes sufficient to increase the alpha-helicity of the fragment. In some instances, the amino acid changes introduced will involve adding a recognized alpha-helix enhancing amino acid. Alternatively, the amino acid changes will involve removing one or more amino acids from the TAT fragment that impede alpha helix formation or stability. In a more specific embodiment, the TAT fragment will include at least one amino acid substitution with an alpha-helix enhancing amino acid. Typically the TAT fragment will be made by standard peptide synthesis techniques although recombinant DNA approaches may be used in some cases. In one embodiment, the substitution is selected so that at least two basic amino acid residues in the TAT fragment are substantially aligned along at least one face of that TAT fragment. In a more specific embodiment, the substitution is chosen so that at least two basic amino acid residues in the TAT 49-56 sequence are substantially aligned along at least one face of that sequence.

[0116] Additional transduction proteins (PTDs) that can be used in the compositions and methods of the disclosure include the TAT fragment in which the TAT 49-56 sequence has been modified so that at least two basic amino acids in the sequence are substantially aligned along at least one face of the TAT fragment. Illustrative TAT fragments include at least one specified amino acid substitution in at least amino acids 49-56 of TAT which substitution aligns the basic amino acid residues of the 49-56 sequence along at least one face of the segment and typically the TAT 49-56 sequence.

[0117] Thus, PTDs that can be conjugated to a peptide of the disclosure include, but are not limited to, AntHD, TAT, VP22, cationic prion protein domains, and functional fragments thereof. Not only can these peptides pass through the plasma membrane, but the attachment of other peptide or polypeptides are sufficient to stimulate the cellular uptake of these complexes. Such chimeric peptides/polypeptide are present in a biologically active form within the cytoplasm and nucleus. Characterization of this process has shown that the uptake of these fusion polypeptides can be rapid, often occurring within minutes, in a receptor independent fashion. Moreover, the transduction of these proteins does not appear to be affected by cell type, and these proteins can efficiently transduce ˜100% of cells in culture with no apparent toxicity (Nagahara et al., Nat. Med. 4:1449-52, 1998).

[0118] In a particular embodiment, the disclosure therefore provides methods and compositions that combine the use of PTDs, such as TAT and poly-Arg, with a drug-like peptide disclosed herein to facilitate the uptake of the construct into and/or release within targeted cells. The drug-like peptides disclosed herein can be delivered into cells using one or more PTDs linked to the drug-like peptide.

[0119] In general, the delivery domain that is linked to a drug-like peptide disclosed herein can be nearly any synthetic or naturally-occurring amino acid sequence which assists in the intracellular delivery of a construct disclosed herein into targeted cells. For example, delivery of a drug-like peptide (see, Table 1) in accordance with the disclosure can be accomplished by use of a peptide transduction domain, such as an HIV TAT protein or fragment thereof, that is covalently linked to a drug-like peptide of the disclosure. Alternatively, the peptide transduction domain can comprise the Antennapedia homeodomain or the HSV VP22 sequence, the N-terminal fragment of a prion protein or suitable transducing fragments thereof such as those known in the art.

[0120] The type and size of the PTD will be guided by several parameters including the extent of transfection desired. Typically the PTD will be capable of transfecting at least about 20%, 25%, 50%, 75%, 80% or 90%, 95%, 98% and up to, and including, about 100% of the cells. Transfection efficiency, typically expressed as the percentage of transfected cells, can be determined by several conventional methods.

[0121] PTDs will manifest cell entry and exit rates (sometimes referred to as k₁ and k₂, respectively) that favor at least picomolar amounts of a construct disclosed herein into a targeted cell. The entry and exit rates of the PTD and any cargo can be readily determined or at least approximated by standard kinetic analysis using detectably-labeled fusion molecules. Typically, the ratio of the entry rate to the exit rate will be in the range of between about 5 to about 100 up to about 1000.

[0122] Also included are chimeric PTD domains. Such chimeric PTDs include parts of at least two different transducing proteins. For example, chimeric PTDs can be formed by fusing two different TAT fragments, e.g., one from HIV-1 and the other from HIV-2 or one from a prion protein and one from HIV.

[0123] Peptide linkers that can be used in the constructs and methods of the disclosure will typically comprise up to about 20 or 30 amino acids, commonly up to about 10 or 15 amino acids, and still more often from about 1 to 5 amino acids. The linker sequence is generally flexible so as not to hold the fusion molecule in a single rigid conformation. The linker sequence can be used, e.g., to space the PTD domain from a drug-like peptide to be delivered. For example, the peptide linker sequence can be positioned between the peptide transduction domain and the therapeutic drug-like peptide domain, e.g., to provide molecular flexibility. The length of the linker moiety can be chosen to optimize the biological activity of the peptide or polypeptide comprising, for example, a PTD domain fusion construct and can be determined empirically without undue experimentation. Examples of linker moieties are -Gly-Gly-, GGGGS (SEQ ID NO:9506), wherein SEQ ID NO:19 can be repeated 1 or more times, GKSSGSGSESKS (SEQ ID NO:9507), GSTSGSGKSSEGKG (SEQ ID NO:9508), GSTSGSGKSSEGSGSTKG (SEQ ID NO:9509), GSTSGSGKPGSGEGSTKG (SEQ ID NO:9510), or EGKSSGSGSESKEF (SEQ ID NO:9511). Peptide or polypeptide linking moieties are described, for example, in Huston et al., Proc. Nat'l Acad. Sci. 85:5879, 1988; Whitlow et al., Protein Engineering 6:989, 1993; and Newton et al., Biochemistry 35:545, 1996. Other suitable peptide or polypeptide linkers are those described in U.S. Pat. Nos. 4,751,180 and 4,935,233, which are hereby incorporated by reference.

[0124] The amino acid sequences of the various oncogenic and receptor proteins described herein are provided and known in the art (see, Table 1). The drug-like peptides of the disclosure (see, Table 1), may be synthesized by solid-phase peptide synthesis methods using procedures similar to those described by Merrifield et al., J. Am. Chem. Soc., 85:2149-2156 (1963); Barany and Merrifield, Solid-Phase Peptide Synthesis, in The Peptides: Analysis, Synthesis, Biology Gross and Meienhofer (eds.), Academic Press, N.Y., vol. 2, pp. 3-284 (1980); and Stewart et al., Solid Phase Peptide Synthesis 2nd ed., Pierce Chem. Co., Rockford, Ill. (1984). During synthesis, N-α-protected amino acids having protected side chains are added stepwise to a growing polypeptide chain linked by its C-terminal and to a solid support, e.g., polystyrene beads. The peptides are synthesized by linking an amino group of an N-α-deprotected amino acid to an α-carboxy group of an N-α-protected amino acid that has been activated by reacting it with a reagent such as dicyclohexylcarbodiimide. The attachment of a free amino group to the activated carboxyl leads to peptide bond formation. A commonly used N-α-protecting groups include Boc, which is acid labile, and Fmoc, which is base labile.

[0125] Materials suitable for use as the solid support are well known to those of skill in the art and include, but are not limited to: halomethyl resins, such as chloromethyl resin or bromomethyl resin; hydroxymethyl resins; phenol resins, such as 4-(α[2,4-dimethoxyphenyl]-Fmoc-aminomethyl)phenoxy resin; tert-alkyloxycarbonyl-hydrazidated resins, and the like. Such resins are commercially available and their methods of preparation are known by those of ordinary skill in the art.

[0126] Briefly, the C-terminal N-α-protected amino acid can be first attached to the solid support. The N-α-protecting group can then be removed. The deprotected α-amino group can be coupled to the activated a-carboxylate group of the next N-α-protected amino acid. The process can be repeated until the desired peptide is synthesized. The resulting peptides are then cleaved from the insoluble polymer support and the amino acid side chains deprotected. Longer peptides can be derived by condensation of protected peptide fragments. Details of appropriate chemistries, resins, protecting groups, protected amino acids and reagents are well known in the art and so are not discussed in detail herein (See, Atherton et al., Solid Phase Peptide Synthesis: A Practical Approach, IRL Press (1989), and Bodanszky, Peptide Chemistry, A Practical Textbook, 2nd Ed., Springer-Verlag (1993)).

[0127] Following verification of the coding sequence, a peptide of interest (e.g., a drug-like peptide of the disclosure) can be produced using routine techniques in the field of recombinant molecular biology, relying on the polynucleotide sequences encoding the peptide. The coding sequence of the peptide can be easily deduced using the degeneracy of the genetic code and a codon table.

[0128] To obtain high level expression of a nucleic acid encoding a peptide of interest, one typically subclones the polynucleotide coding sequence into an expression vector that contains a strong promoter to direct transcription, a transcription/translation terminator and a ribosome binding site for translational initiation. Suitable bacterial promoters are well known in the art and described, e.g., in Sambrook and Russell, supra, and Ausubel et al. Bacterial expression systems for expressing recombinant polypeptides are available in, e.g., E. coli, Bacillus sp., Salmonella, and Caulobacter. Kits for such expression systems are commercially available. Eukaryotic expression systems for mammalian cells, yeast, and insect cells are well known in the art and are also commercially available. In one embodiment, the eukaryotic expression vector is an adenoviral vector, an adeno-associated vector, or a retroviral vector.

[0129] The promoter used to direct expression of a heterologous nucleic acid depends on the particular application. In some embodiments, the promoter is optionally positioned about the same distance from the heterologous transcription start site as it is from the transcription start site in its natural setting. As is known in the art, however, some variation in this distance can be accommodated without loss of promoter function.

[0130] In addition to the promoter, the expression vector typically includes a transcription unit or expression cassette that contains all the additional elements required for the expression of the desired peptide in host cells. A typical expression cassette thus contains a promoter operably linked to the nucleic acid sequence encoding the peptide and signals required for efficient polyadenylation of the transcript, ribosome binding sites, and translation termination. The nucleic acid sequence encoding the desired peptide is typically linked to a cleavable signal peptide sequence to promote secretion of the recombinant polypeptide by the transformed cell. Such signal peptides include, among others, the signal peptides from tissue plasminogen activator, insulin, and neuron growth factor, and juvenile hormone esterase of Heliothis virescens. If, however, a recombinant polypeptide is intended to be expressed on the host cell surface, an appropriate anchoring sequence is used in concert with the coding sequence. Additional elements of the cassette may include enhancers and, if genomic DNA is used as the structural gene, introns with functional splice donor and acceptor sites.

[0131] In addition to a promoter sequence, the expression cassette should also contain a transcription termination region downstream of the structural peptide coding sequence to provide for efficient termination. The termination region may be obtained from the same gene as the promoter sequence or may be obtained from different genes.

[0132] The particular expression vector used to transport the genetic information into the cell is not particularly critical. Any of the conventional vectors used for expression in eukaryotic or prokaryotic cells may be used. Standard bacterial expression vectors include plasmids such as pBR322 based plasmids, pSKF, pET23D, and fusion expression systems such as GST and LacZ. Epitope tags can also be added to recombinant proteins to provide convenient methods of isolation, e.g., c-myc.

[0133] Expression vectors containing regulatory elements from eukaryotic viruses are typically used in eukaryotic expression vectors, e.g., SV40 vectors, papilloma virus vectors, and vectors derived from Epstein-Barr virus. Other exemplary eukaryotic vectors include pMSG, pAV009/A⁺, pMTO10/A⁺, pMAMneo-5, baculovirus pDSVE, and any other vector allowing expression of proteins under the direction of the SV40 early promoter, SV40 later promoter, metallothionein promoter, murine mammary tumor virus promoter, Rous sarcoma virus promoter, polyhedrin promoter, or other promoters shown effective for expression in eukaryotic cells.

[0134] Some expression systems have markers that provide gene amplification such as thymidine kinase, hygromycin B phosphotransferase, and dihydrofolate reductase. Alternatively, high yield expression systems not involving gene amplification are also suitable, such as a baculovirus vector in insect cells, with a polynucleotide sequence encoding the desired peptide under the direction of the polyhedrin promoter or other strong baculovirus promoters.

[0135] When periplasmic expression of a recombinant polypeptide is desired, the expression vector further comprises a sequence encoding a secretion signal, such as the E. coli OppA (Periplasmic Oligopeptide Binding Protein) secretion signal or a modified version thereof, which is directly connected to 5′ of the coding sequence of the peptide to be expressed. This signal sequence directs the recombinant peptide produced in the cytoplasm through the cell membrane into the periplasmic space. The expression vector may further comprise a coding sequence for signal peptidase 1, which is capable of enzymatically cleaving the signal sequence when the recombinant peptide is entering the periplasmic space. More detailed description for periplasmic production of a recombinant protein can be found in, e.g., Gray et al., Gene 39: 247-254 (1985), U.S. Pat. Nos. 6,160,089 and 6,436,674.

[0136] Standard transfection methods are used to produce bacterial, mammalian, yeast, insect, or plant cell lines that express large quantities of a recombinant peptide or polypeptide, which are then purified using standard techniques (see, e.g., Colley et al., J. Biol. Chem. 264: 17619-17622 (1989); Guide to Protein Purification, in Methods in Enzymology, vol. 182 (Deutscher, ed., 1990)). Transformation of eukaryotic and prokaryotic cells are performed according to standard techniques (see, e.g., Morrison, J. Bact. 132: 349-351 (1977); Clark-Curtiss & Curtiss, Methods in Enzymology 101: 347-362 (Wu et al., eds, 1983).

[0137] Any of the well-known procedures for introducing foreign nucleotide sequences into host cells may be used. These include the use of calcium phosphate transfection, polybrene, protoplast fusion, electroporation, liposomes, microinjection, plasma vectors, viral vectors and any of the other well-known methods for introducing cloned genomic DNA, cDNA, synthetic DNA, or other foreign genetic material into a host cell. In some embodiments, it is only necessary that the particular genetic engineering procedure used be capable of successfully introducing at least one gene into the host cell capable of expressing the recombinant polypeptide.

[0138] In some embodiments, once the expression of a recombinant peptide in transfected host cells is confirmed, e.g., by an immunological assay, activity assay or sequencing, the host cells are then cultured in an appropriate scale for the purpose of purifying the recombinant peptide.

[0139] When desired polypeptides are produced recombinantly by transformed bacteria in large amounts, typically after promoter induction, although expression can be constitutive, the polypeptides may form insoluble aggregates. There are several protocols that are suitable for purification of protein inclusion bodies. For example, purification of aggregate proteins (hereinafter referred to as inclusion bodies) typically involves the extraction, separation and/or purification of inclusion bodies by disruption of bacterial cells, e.g., by incubation in a buffer of about 100-150 μg/ml lysozyme and 0.1% Nonidet P40, a non-ionic detergent. The cell suspension can be ground using a Polytron grinder (Brinkman Instruments, Westbury, N.Y.). Alternatively, the cells can be sonicated on ice. Alternate methods of lysing bacteria are described in Ausubel et al. and Sambrook and Russell, and will be apparent to those of skill in the art.

[0140] The cell suspension is generally centrifuged and the pellet containing the inclusion bodies resuspended in buffer which does not dissolve but washes the inclusion bodies, e.g., 20 mM Tris-HCl (pH 7.2), 1 mM EDTA, 150 mM NaCl and 2% Triton-X 100, a non-ionic detergent. It may be necessary to repeat the wash step to remove as much cellular debris as possible. The remaining pellet of inclusion bodies may be resuspended in an appropriate buffer (e.g., 20 mM sodium phosphate, pH 6.8, 150 mM NaCl). Other appropriate buffers will be apparent to those of skill in the art.

[0141] Following the washing step, the inclusion bodies are solubilized by the addition of a solvent that can be both a strong hydrogen acceptor and a strong hydrogen donor (or a combination of solvents each having one of these properties). The peptides that formed the inclusion bodies may then be renatured by dilution or dialysis with a compatible buffer. Suitable solvents include, but are not limited to, urea (from about 4 M to about 8 M), formamide (at least about 80%, volume/volume basis), and guanidine hydrochloride (from about 4 M to about 8 M). Some solvents that are capable of solubilizing aggregate-forming peptides, such as SDS (sodium dodecyl sulfate) and 70% formic acid, may be inappropriate for use in this procedure due to the possibility of irreversible denaturation of the peptides, accompanied by a lack of immunogenicity and/or activity. Although guanidine hydrochloride and similar agents are denaturants, this denaturation may not be irreversible and renaturation may occur upon removal (by dialysis, for example) or dilution of the denaturant, allowing re-formation of the immunologically and/or biologically active protein of interest. After solubilization, the peptide can be separated from other bacterial proteins by standard separation techniques. For further description of purifying recombinant peptides from bacterial inclusion body, see, e.g., Patra et al., Protein Expression and Purification 18: 182-190 (2000).

[0142] Alternatively, it is possible to purify recombinant peptides from bacterial periplasm. In some cases, where the recombinant peptide is exported into the periplasm of the bacteria, the periplasmic fraction of the bacteria can be isolated by cold osmotic shock in addition to other methods known to those of skill in the art (see e.g., Ausubel et al., supra). To isolate recombinant peptides from the periplasm, the bacterial cells can be centrifuged to form a pellet. The pellet is resuspended in a buffer containing 20% sucrose. To lyse the cells, the bacteria can be centrifuged and the pellet can then be resuspended in ice-cold 5 mM MgSO₄ and kept in an ice bath for approximately 10 minutes. The cell suspension can be centrifuged and the supernatant decanted and saved. The recombinant peptides present in the supernatant can be separated from the host proteins by standard separation techniques well known to those of skill in the art.

[0143] When a recombinant polypeptide or peptide is expressed in host cells in a soluble form, its purification can follow the standard protein purification procedure described below. This standard purification procedure can also be suitable for purifying polypeptides obtained from chemical synthesis.

[0144] In some embodiments, as an initial step, and if the protein mixture is complex, an initial salt fractionation can separate many of the unwanted host cell proteins (or proteins derived from the cell culture media) from the recombinant peptide of interest. A typical salt is ammonium sulfate. Ammonium sulfate precipitates polypeptides by effectively reducing the amount of water in the protein mixture. Proteins then precipitate on the basis of their solubility. The more hydrophobic a protein is, the more likely it is to precipitate at lower ammonium sulfate concentrations. A typical protocol is to add saturated ammonium sulfate to a protein solution so that the resultant ammonium sulfate concentration is between 20-30%. In some cases, this will precipitate the most hydrophobic proteins. The precipitate can be discarded (unless the protein of interest is hydrophobic) and ammonium sulfate can be added to the supernatant to a concentration known to precipitate the protein of interest. The precipitate can then be solubilized in buffer and the excess salt removed if necessary, through either dialysis or diafiltration. Other methods that rely on solubility of proteins, such as cold ethanol precipitation, are well known to those of skill in the art and can be used to fractionate complex protein mixtures.

[0145] The drug-like peptides of the disclosure can also be separated from other proteins on the basis of their size, net surface charge, hydrophobicity, or affinity for ligands.

[0146] For delivery to a cell or organism, a nucleic acid encoding a drug-like peptide of the disclosure can be incorporated into a vector. Examples of vectors used for such purposes include expression plasmids capable of directing the expression of the drug-like peptide in the target cell. In other instances, the vector can be a viral vector system wherein the nucleic acid encoding the drug-like peptide is incorporated into a viral genome that is capable of transfecting the target cell.

[0147] As used herein, “gene delivery system” refers to any means for the delivery of a nucleic acid encoding a drug-like peptide of the disclosure to a target cell. Viral vector systems useful in the introduction and expression of a nucleic acid include, for example, naturally occurring or recombinant viral vector systems. Depending upon the particular application, suitable viral vectors include replication competent, replication deficient, and conditionally replicating viral vectors. For example, viral vectors can be derived from the genome of human or bovine adenoviruses, vaccinia virus, herpes virus, adeno-associated virus, minute virus of mice (MVM), HIV, sindbis virus, and retroviruses (including but not limited to Rous sarcoma virus), and MoMLV. Typically, the nucleic acid is inserted into such vectors to allow packaging of the gene construct, typically with accompanying viral DNA, followed by infection of a sensitive host cell and expression of the gene of interest.

[0148] Similarly, viral envelopes used for packaging gene constructs that include the nucleic acid can be modified by the addition of receptor ligands or antibodies specific for a receptor to permit receptor-mediated endocytosis into specific cells.

[0149] Retroviral vectors may also be useful for introducing the nucleic acid into target cells or organisms. Retroviral vectors are produced by genetically manipulating retroviruses. The viral genome of retroviruses is RNA. Upon infection, this genomic RNA is reverse transcribed into a DNA copy that is integrated into the chromosomal DNA of transduced cells with a high degree of stability and efficiency. The integrated DNA copy is referred to as a provirus and is inherited by daughter cells as is any other gene. The wild type retroviral genome and the proviral DNA comprise three genes: the gag, the pol and the env genes, which are flanked by two long terminal repeat (LTR) sequences. The gag gene encodes the internal structural (nucleocapsid) proteins; the pol gene encodes the RNA directed DNA polymerase (reverse transcriptase); and the env gene encodes viral envelope glycoproteins. The 5′ and 3′ LTRs serve to promote transcription and polyadenylation of virion RNAs. Adjacent to the 5′ LTR are sequences necessary for reverse transcription of the genome (the tRNA primer binding site) and for efficient encapsulation of viral RNA into particles (the Psi site) (see, Mulligan, In: Experimental Manipulation of Gene Expression, Inouye (ed), 155-173 (1983); Mann et al., Cell 33:153-159 (1983); Cone and Mulligan, Proceedings of the National Academy of Sciences, U.S.A., 81:6349-6353 (1984)).

[0150] The design of retroviral vectors is well known to those of ordinary skill in the art. In brief, if the sequences necessary for encapsidation (or packaging of retroviral RNA into infectious virions) are missing from the viral genome, the result is a cis acting defect which prevents encapsidation of genomic RNA. However, the resulting mutant is still capable of directing the synthesis of all virion proteins. Retroviral genomes from which these sequences have been deleted, as well as cell lines containing the mutant genome stably integrated into the chromosome are well known in the art and are used to construct retroviral vectors. Preparation of retroviral vectors and their uses are described in many publications including, e.g., European Patent Application EPA 0 178 220; U.S. Pat. No. 4,405,712, Gilboa Biotechniques 4:504-512 (1986); Mann et al., Cell 33:153-159 (1983); Cone and Mulligan Proc. Natl. Acad. Sci. USA 81:6349-6353 (1984); Eglitis et al. Biotechniques 6:608-614 (1988); Miller et al. Biotechniques 7:981-990 (1989); Miller (1992) supra; Mulligan (1993), supra; and WO 92/07943.

[0151] The retroviral vector particles are prepared by recombinantly inserting the desired nucleic acid sequence encoding a drug-like peptide of the disclosure into a retrovirus vector and packaging the vector with retroviral capsid proteins by use of a packaging cell line. The resultant retroviral vector particle is incapable of replication in the host cell but is capable of integrating into the host cell genome as a proviral sequence containing the desired nucleotide sequence.

[0152] Delivery of a drug-like peptide of the disclosure can be achieved by contacting a cell with a nucleic acid construct or using direct delivery of the drug-like peptide or fusion peptide. In a particular embodiment, a drug-like peptide of the disclosure (e.g., a therapeutic peptide) can be formulated with various carriers, dispersion agents and the like, as are described more fully elsewhere herein.

[0153] A pharmaceutical composition according to the disclosure can be prepared to include a drug-like peptide as disclosed herein, into a form suitable for administration to a subject using carriers, excipients, and additives or auxiliaries. Frequently used carriers or auxiliaries include magnesium carbonate, titanium dioxide, lactose, mannitol and other sugars, talc, milk protein, gelatin, starch, vitamins, cellulose and its derivatives, animal and vegetable oils, polyethylene glycols and solvents, such as sterile water, alcohols, glycerol, and polyhydric alcohols. Intravenous vehicles include fluid and nutrient replenishers. Preservatives include antimicrobial, anti-oxidants, chelating agents, and inert gases. Other pharmaceutically acceptable carriers include aqueous solutions, non-toxic excipients, including salts, preservatives, buffers and the like, as described, for instance, in Remington's Pharmaceutical Sciences, and The National Formulary, 30th ed., the contents of which are hereby incorporated by reference. The pH and exact concentration of the various components of the pharmaceutical composition are adjusted according to routine skills in the art. See Goodman and Gilman's, The Pharmacological Basis for Therapeutics.

[0154] The pharmaceutical compositions according to the disclosure may be administered locally or systemically. The therapeutically effective amounts will vary according to factors, such as the degree of infection in a subject, the age, sex, and weight of the individual. Dosage regimes can be adjusted to provide the optimum therapeutic response. For example, several divided doses can be administered daily or the dose can be proportionally reduced as indicated by the exigencies of the therapeutic situation.

[0155] The pharmaceutical composition can be administered in a convenient manner, such as by injection (e.g., subcutaneous, intravenous, intraorbital, and the like), oral administration, ophthalmic application, inhalation, transdermal application, topical application, or rectal administration. Depending on the route of administration, the pharmaceutical composition can be coated with a material to protect the pharmaceutical composition from the action of enzymes, acids, and other natural conditions that may inactivate the pharmaceutical composition. The pharmaceutical composition can also be administered parenterally or intraperitoneally. Dispersions can also be prepared in glycerol, liquid polyethylene glycols, and mixtures thereof, and in oils. Under ordinary conditions of storage and use, these preparations may contain a preservative to prevent the growth of microorganisms.

[0156] Pharmaceutical compositions suitable for injectable use include sterile aqueous solutions (where water soluble) or dispersions and sterile powders for the extemporaneous preparation of sterile injectable solutions or dispersions. The composition will typically be sterile and fluid to the extent that easy syringability exists. Typically, the composition will be stable under the conditions of manufacture and storage and preserved against the contaminating action of microorganisms, such as bacteria and fungi. The carrier can be a solvent or dispersion medium containing, for example, water, ethanol, polyol (for example, glycerol, propylene glycol, and liquid polyethylene glycol, and the like), suitable mixtures thereof, and vegetable oils. The proper fluidity can be maintained, for example, by the use of a coating, such as lecithin, by the maintenance of the required particle size, in the case of dispersion, and by the use of surfactants. Prevention of the action of microorganisms can be achieved by various antibacterial and antifungal agents, for example, parabens, chlorobutanol, phenol, ascorbic acid, thimerosal, and the like. In many cases, isotonic agents, for example, sugars, polyalcohols, such as mannitol, sorbitol, or sodium chloride are used in the composition. Prolonged absorption of the injectable compositions can be brought about by including in the composition an agent that delays absorption, for example, aluminum monostearate and gelatin.

[0157] Sterile injectable solutions can be prepared by incorporating the pharmaceutical composition in the required amount in an appropriate solvent with one or a combination of ingredients enumerated above, as required, followed by filtered sterilization. Generally, dispersions are prepared by incorporating the pharmaceutical composition into a sterile vehicle that contains a basic dispersion medium and the required other ingredients from those enumerated above.

[0158] The pharmaceutical composition can be orally administered, for example, with an inert diluent or an assimilable edible carrier. The pharmaceutical composition and other ingredients can also be enclosed in a hard or soft-shell gelatin capsule, compressed into tablets, or incorporated directly into the subject's diet. For oral therapeutic administration, the pharmaceutical composition can be incorporated with excipients and used in the form of ingestible tablets, buccal tablets, troches, capsules, elixirs, suspensions, syrups, wafers, and the like. Such compositions and preparations should contain at least 1% by weight of active compound. The percentage of the compositions and preparations can, of course, be varied and can conveniently be between about 5% to about 80% of the weight of the unit. The tablets, troches, pills, capsules, and the like can also contain the following: a binder, such as gum tragacanth, acacia, corn starch, or gelatin; excipients such as dicalcium phosphate; a disintegrating agent, such as corn starch, potato starch, alginic acid, and the like; a lubricant, such as magnesium stearate; and a sweetening agent, such as sucrose, lactose or saccharin, or a flavoring agent such as peppermint, oil of wintergreen, or cherry flavoring. When the dosage unit form is a capsule, it can contain, in addition to materials of the above type, a liquid carrier. Various other materials can be present as coatings or to otherwise modify the physical form of the dosage unit. For instance, tablets, pills, or capsules can be coated with shellac, sugar, or both. A syrup or elixir can contain the agent, sucrose as a sweetening agent, methyl and propylparabens as preservatives, a dye, and flavoring, such as cherry or orange flavor. Of course, any material used in preparing any dosage unit form should be pharmaceutically pure and substantially non-toxic in the amounts employed. In addition, the pharmaceutical composition can be incorporated into sustained-release preparations and formulations.

[0159] Thus, a pharmaceutically acceptable carrier can include solvents, dispersion media, coatings, antibacterial and antifungal agents, isotonic and absorption delaying agents, and the like. In some cases, the use of such media and agents for pharmaceutically active substances is well known in the art. Except insofar as any conventional media or agent is incompatible with the pharmaceutical composition, use thereof in the therapeutic compositions and methods of treatment is contemplated. Supplementary active compounds can also be incorporated into the compositions.

[0160] In some embodiments, it can be especially advantageous to formulate parenteral compositions in dosage unit form for ease of administration and uniformity of dosage. Dosage unit form as used herein, refers to physically discrete units suited as unitary dosages for the subject to be treated; each unit containing a predetermined quantity of pharmaceutical composition can be calculated to produce the desired therapeutic effect in association with the required pharmaceutical carrier. The specification for the dosage unit forms of the disclosure are related to the characteristics of the pharmaceutical composition and the particular therapeutic effect to be achieve. The principal pharmaceutical composition is compounded for convenient and effective administration in effective amounts with a suitable pharmaceutically acceptable carrier in an acceptable dosage unit. In the case of compositions containing supplementary active ingredients, the dosages are determined by reference to the usual dose and manner of administration of the said ingredients.

[0161] For topical formulations, the base composition can be prepared with any solvent system, such as those Generally Regarded as Safe (GRAS) by the U.S. Food & Drug Administration (FDA). GRAS solvent systems include many short chain hydrocarbons, such as butane, propane, n-butane, or a mixture thereof, as the delivery vehicle, which are approved by the FDA for topical use. The topical compositions can be formulated using any dermatologically acceptable carrier. Exemplary carriers include a solid carrier, such as alumina, clay, microcrystalline cellulose, silica, or talc; and/or a liquid carrier, such as an alcohol, a glycol, or a water-alcohol/glycol blend. The compounds may also be administered in liposomal formulations that allow compounds to enter the skin. Such liposomal formulations are described in U.S. Pat. Nos. 5,169,637; 5,000,958; 5,049,388; 4,975,282; 5,194,266; 5,023,087; 5,688,525; 5,874,104; 5,409,704; 5,552,155; 5,356,633; 5,032,582; 4,994,213; and PCT Publication No. WO 96/40061. Examples of other appropriate vehicles are described in U.S. Pat. No. 4,877,805, U.S. Pat. No. 4,980,378, U.S. Pat. No. 5,082,866, U.S. Pat. No. 6,118,020 and EP Publication No. 0586106A1. Suitable vehicles of the disclosure may also include mineral oil, petrolatum, polydecene, stearic acid, isopropyl myristate, polyoxyl 40 stearate, stearyl alcohol, or vegetable oil.

[0162] Topical compositions can be provided in any useful form. For example, the compositions of the disclosure may be formulated as solutions, emulsions (including microemulsions), suspensions, creams, foams, lotions, gels, powders, balm, or other typical solid, semi-solid, or liquid compositions used for application to the skin or other tissues where the compositions may be used. Such compositions may contain other ingredients typically used in such products, such as colorants, fragrances, thickeners, antimicrobials, solvents, surfactants, detergents, gelling agents, antioxidants, fillers, dyestuffs, viscosity-controlling agents, preservatives, humectants, emollients (e.g., natural or synthetic oils, hydrocarbon oils, waxes, or silicones), hydration agents, chelating agents, demulcents, solubilizing excipients, adjuvants, dispersants, skin penetration enhancers, plasticizing agents, preservatives, stabilizers, demulsifiers, wetting agents, sunscreens, emulsifiers, moisturizers, astringents, deodorants, and optionally including anesthetics, anti-itch actives, botanical extracts, conditioning agents, darkening or lightening agents, glitter, humectants, mica, minerals, polyphenols, silicones or derivatives thereof, sunblocks, vitamins, and phytomedicinals.

[0163] In some formulations, the composition can be formulated for ocular application. For example, a pharmaceutical formulation for ocular application can include a polynucleotide construct as described herein in an amount that is, e.g., up to 99% by weight mixed with a physiologically acceptable ophthalmic carrier medium such as water, buffer, saline, glycine, hyaluronic acid, mannitol, and the like. For ophthalmic delivery, a polynucleotide construct as described herein may be combined with ophthalmologically acceptable preservatives, co-solvents, surfactants, viscosity enhancers, penetration enhancers, buffers, sodium chloride, or water to form an aqueous, sterile ophthalmic suspension or solution. Ophthalmic solution formulations may be prepared by dissolving the polynucleotide construct in a physiologically acceptable isotonic aqueous buffer. Further, the ophthalmic solution may include an ophthalmologically acceptable surfactant to assist in dissolving the inhibitor. Viscosity building agents, such as hydroxymethyl cellulose, hydroxyethyl cellulose, methylcellulose, polyvinylpyrrolidone, or the like may be added to the compositions of the disclosure to improve the retention of the compound.

[0164] Topical compositions can be delivered to the surface of the eye, e.g., one to four times per day, or on an extended delivery schedule such as daily, weekly, bi-weekly, monthly, or longer, according to the routine discretion of a skilled clinician. The pH of the formulation can range from about pH 4-9, or about pH 4.5 to pH 7.4.

[0165] For nucleic acid constructs of the disclosure, suitable pharmaceutically acceptable salts include (i) salts formed with cations such as sodium, potassium, ammonium, magnesium, calcium, polyamines such as spermine and spermidine, etc.; (ii) acid addition salts formed with inorganic acids, for example hydrochloric acid, hydrobromic acid, sulfuric acid, phosphoric acid, nitric acid and the like; (iii) salts formed with organic acids such as, for example, acetic acid, oxalic acid, tartaric acid, succinic acid, maleic acid, fumaric acid, gluconic acid, citric acid, malic acid, ascorbic acid, benzoic acid, tannic acid, palmitic acid, alginic acid, polyglutamic acid, naphthalenesulfonic acid, methanesulfonic acid, p-toluenesulfonic acid, naphthalenedisulfonic acid, polygalacturonic acid, and the like; and (iv) salts formed from elemental anions such as chlorine, bromine, and iodine.

[0166] The disclosure provides methods for treating a subject with a cancer or suspected of having a cancer comprising administering a drug-like peptide of the disclosure (see, Table 1) comprising a therapeutically effective amount of one or more drug-like peptide and optionally one or more anticancer agents disclosed herein. A therapeutically effective amount can be measured as the amount sufficient to prevent cancer cells from dividing, metastasizing and/or growing, ultimately killing the cancer cells or reducing the metastatic potential of the cancer cell. Generally, the optimal dosage of will depend upon the type and stage of the cancer and factors such as the weight, sex, and condition of the subject. Nonetheless, suitable dosages can readily be determined by one skilled in the art. Typically, dosages used in vitro may provide useful guidance in the amounts useful for in situ administration of the pharmaceutical composition, and animal models may be used to determine effective dosages for treatment of specific cancers. Various considerations are described, e.g., in Langer, Science, 249: 1527, (1990); Gilman et al. (eds.) (1990), each of which is herein incorporated by reference. Typically, a suitable dosage can be 1 to 1000 mg/kg body weight, e.g., 10 to 500 mg/kg body weight. In a particular embodiment, a drug-like peptide disclosed herein can be administered at dosage of 1 mg/kg, 2mg/kg, 3 mg/kg, 4 mg/kg, 5 mg/kg, 6 mg/kg, 7 mg/kg, 8 mg/kg, 9 mg/kg, 10 mg/kg, 20 mg/kg, 30 mg/kg, 40 mg/kg, 50 mg/kg, 60 mg/kg, 70 mg/kg, 80 mg/kg, 90 mg/kg, 100 mg/kg, 110 mg/kg, 120 mg/kg, 130 mg/kg, 140 mg/kg, 150 mg/kg, 160 mg/kg, 170 mg/kg, 180 mg/kg, 190 mg/kg, 200 mg/kg, 210 mg/kg, 220 mg/kg, 230 mg/kg, 250 mg/kg, 300 mg/kg, 350 mg/kg, 400 mg/kg, 450 mg/kg, 500 mg/kg, 550 mg/kg, 600 mg/kg, 650 mg/kg, 700 mg/kg, 750 mg/kg, 800 mg/kg, 850 mg/kg, 900 mg/kg, 950 mg/kg, 100 mg/kg, or a range that includes or is between any two of the foregoing dosages, including fractional dosages thereof.

[0167] Examples, of anticancer agents that can be used with the drug-like peptides disclosed herein include, but are not limited to, alkylating agents such as thiotepa and CYTOXAN® cyclosphosphamide; alkyl sulfonates such as busulfan, improsulfan and piposulfan; aziridines such as benzodopa, carboquone, meturedopa, and uredopa; ethylenimines and methylamelamines including altretamine, triethylenemelamine, trietylenephosphoramide, triethiylenethiophosphoramide and tiimethylolomelamine; acetogenins (e.g., bullatacin and bullatacinone); a camptothecin (including the synthetic analogue topotecan); bryostatin; callystatin; CC-1065 (including its adozelesin, carzelesin and bizelesin synthetic analogues); cryptophycins (particularly cryptophycin 1 and cryptophycin 8); dolastatin; duocarmycin (including the synthetic analogues, KW-2189 and CB1-TM1); eleutherobin; pancratistatin; a sarcodictyin; spongistatin; nitrogen mustards such as chlorambucil, chlornaphazine, cholophosphamide, estramustine, ifosfamide, mechlorethamine, mechlorethamine oxide hydrochloride, melphalan, novembichin, phenesterine, prednimustine, trofosfamide, uracil mustard; nitrosureas such as carmustine, chlorozotocin, fotemustine, lomustine, nimustine, and ranimnustine; vinca alkaloids; epipodophyllotoxins; antibiotics such as the enediyne antibiotics (e.g., calicheamicin, especially calicheamicin gammall and calicheamicin omegall; L-asparaginase; anthracenedione substituted urea; methyl hydrazine derivatives; dynemicin, including dynemicin A; bisphosphonates, such as clodronate; an esperamicin; as well as neocarzinostatin chromophore and related chromoprotein enediyne antiobiotic chromophores), aclacinomysins, actinomycin, authramycin, azaserine, bleomycins, cactinomycin, carabicin, carminomycin, carzinophilin, chromomycinis, dactinomycin, daunorubicin, detorubicin, 6-diazo-5-oxo-L-norleucine, ADRIAMYCIN® doxorubicin (including morpholino-doxorubicin, cyanomorpholino-doxorubicin, 2-pyrrolino-doxorubicin and deoxydoxorubicin), epirubicin, esorubicin, idarubicin, marcellomycin, mitomycins such as mitomycin C, mycophenolic acid, nogalamycin, olivomycins, peplomycin, potfiromycin, puromycin, quelamycin, rodorubicin, streptonigrin, streptozocin, tubercidin, ubenimex, zinostatin, zorubicin; anti-metabolites such as methotrexate and 5-fluorouracil (5-FU); folic acid analogs such as denopterin, methotrexate, pteropterin, trimetrexate; purine analogs such as fludarabine, 6-mercaptopurine, thiamiprine, thioguanine; pyrimidine analogs such as ancitabine, azacitidine, 6-azauridine, carmofur, cytarabine, dideoxyuridine, doxifluridine, enocitabine, floxuridine; androgens such as calusterone, dromostanolone propionate, epitiostanol, mepitiostane, testolactone; anti-adrenals such as aminoglutethimide, mitotane, trilostane; folic acid replenisher such as frolinic acid; aceglatone; aldophosphamide glycoside; aminolevulinic acid; eniluracil; amsacrine; bestrabucil; bisantrene; edatraxate; defofamine; demecolcine; diaziquone; elfornithine; elliptinium acetate; an epothilone; etoglucid; gallium nitrate; hydroxyurea; lentinan; lonidainine; maytansinoids such as maytansine and ansamitocins; mitoguazone; mitoxantrone; mopidanmol; nitiaerine; pentostatin; phenamet; pirarubicin; losoxantione; podophyllinic acid; 2-ethylhydrazide; procarbazine; PSK® polysaccharide complex (JHS Natural Products, Eugene, Oreg.); razoxane; rhizoxin; sizofiran; spirogermanium; tenuazonic acid; triaziquone; 2,2 2″-trichlorotiiethylamine; trichothecenes (especially T-2 toxin, verracurin A, roridin A and anguidine); urethan; vindesine; dacarbazine; mannomustine; mitobronitol; mitolactol; pipobroman; gacytosine; arabinoside (“Ara-C”); cyclophosphamide; thiotepa; taxoids, e.g., TAXOL® paclitaxel (Bristol-Myers Squibb Oncology, Princeton, N.J.), ABRAXANE® Cremophor-free, albumin-engineered nanoparticle formulation of paclitaxel (American Pharmaceutical Partners, Schaumberg, Ill.), and TAXOTERE® (docetaxel) (Rhone-Poulenc Rorer, Antony, France); chloranbucil; GEMZAR® (gemcitabine); 6-thioguanine; mercaptopurine; methotrexate; platinum coordination complexes such as cisplatin, oxaliplatin and carboplatin; vinblastine; platinum; etoposide (VP-16); ifosfamide; mitoxantrone; vincristine; NAVELBINE® vinorelbine; novantrone; teniposide; edatrexate; daunomycin; aminopterin; xeloda; ibandronate; irinotecan (e.g., CPT-11); topoisomerase inhibitor RFS 2000; difluoromethylornithine (DFMO); retinoids such as retinoic acid; capecitabine; leucovorin (LV); irenotecan; adrenocortical suppressant; adrenocorticosteroids; progestins; estrogens; androgens; gonadotropin-releasing hormone analogs; and pharmaceutically acceptable salts, acids or derivatives of any of the above. Also included anticancer agents are anti-hormonal agents that act to regulate or inhibit hormone action on tumors such as anti-estrogens and selective estrogen receptor modulators (SERMs), including, for example, tamoxifen (including NOLVADEX® tamoxifen), raloxifene, droloxifene, 4-hydroxytamoxifen, trioxifene, keoxifene, LY117018, onapristone, and FARESTON-toremifene; aromatase inhibitors that inhibit the enzyme aromatase, which regulates estrogen production in the adrenal glands, such as, for example, 4(5)-imidazoles, aminoglutethimide, MEGASE® megestrol acetate, AROMASL® exemestane, formestanie, fadrozole, RIVISOR® vorozole, FEMARA® letrozole, and ARTMIDEX® anastrozole; and anti-androgens such as flutamide, nilutamide, bicalutamide, leuprolide, and goserelin; as well as troxacitabine (a 1,3-dioxolane nucleoside cytosine analog); antisense oligonucleotides, particularly those which inhibit expression of genes in signaling pathways implicated in abherant cell proliferation, such as, for example, PKC-alpha, Ralf and H-Ras; ribozymes such as a VEGF-A expression inhibitor (e.g., ANGIOZYME® ribozyme) and a HER2 expression inhibitor; vaccines such as gene therapy vaccines, for example, ALLOVECTIN® vaccine, LEUVECTIN® vaccine, and VAXID® vaccine; PROLEUKIN® rJL-2; LURTOTECAN® topoisomerase 1 inhibitor; ABARELLX® rmRH; antibodies such as trastuzumab and pharmaceutically acceptable salts, acids or derivatives of any of the above. In a particular embodiment, the disclosure provides for combined therapy comprising one or more drug-like peptides disclosed herein used in combination with a tyrosine kinase inhibitor (TKI). Examples of protein kinase inhibitors, include but are not limited to, adavosertib, afatinib, axitinib, bosutinib, cetuximab, cobimetinib, crizotinib, cabozantinib, dasatinib, entrectinib, erdafitinib, erlotinib, fostamatinib, gefitinib, ibrutinib, imatinib, lapatinib, lenvatinib, mubritinib, nilotinib, pazopanib, pegaptanib, ruxolitinib, sorafenib, sunitinib, SU6656, vandetanib, and vemurafenib. In another embodiment, the disclosure provides for combined therapy comprising one or more drug-like peptides disclosed herein used in combination with an angiogenesis inhibitor. Examples of angiogenesis inhibitors, include but are not limited to, axitinib, bevacizumab, cabozantinib, everolimus, lenalidomide, lenvatinib mesylate, pazopanib, ramucirumab, regorafenib, sorafenib, sunitinib, thalidomide, vandetanib, and Ziv-aflibercept. In another embodiment, the disclosure provides for combined therapy comprising one or more drug-like peptides disclosed herein used in combination with a PARP inhibitor. Examples of PARP inhibitors, include but are not limited to, olaparib, niraparib, rucaparib, and talzoparib. The anticancer agent may be administered, by a route and in an amount commonly used therefore, simultaneously (at the same time or in the same formulation) or sequentially with a drug-like peptide as disclosed herein. When a drug-like peptide as disclosed herein is used contemporaneously with one or more anticancer agents, a pharmaceutical composition containing the one or more anticancer agents in addition to a drug-like peptide disclosed herein may be utilized but may not be required. Accordingly, the pharmaceutical compositions disclosed herein include those that also contain one or more anticancer agents in addition to a drug-like peptide disclosed herein.

[0168] Provided herein can be peptides or salts thereof and compositions comprising the same. Peptides can be of any length. In some cases, a peptide can have a sequence length from: about 5 amino acids to about 80 amino acids, about 5 amino acids to about 20 amino acids, about 10 amino acids to about 40 amino acids, about 20 amino acids to about 60 amino acids, about 20 amino acids to about 50 amino acids, or about 40 amino acids to about 80 amino acids. In some cases, a peptide or salt thereof can have a sequence length of less than about: 5, 6, 7, 8, 9, 10, 11, 12, 13, 14, 15, 16, 17, 18, 19, 20, 21, 22, 23, 24, 25, 26, 27, 28, 29, 30, 31, 32, 33, 34, 35, 36, 37, 38, 39, 40, 41, 42, 43, 44, 45, 46, 47, 48, 49, 50, 51, 52, 53, 54, 55, 56, 57, 58, 59, 60, 61, 62, 63, 64, 65, 66, 67, 68, 69, 70, 71, 72, 73, 74, 75, 76, 77, 78, 79, or 80 amino acids. In some cases, a peptide can have a sequence length of more than about: 5, 6, 7, 8, 9, 10, 11, 12, 13, 14, 15, 16, 17, 18, 19, 20, 21, 22, 23, 24, 25, 26, 27, 28, 29, 30, 31, 32, 33, 34, 35, 36, 37, 38, 39, 40, 41, 42, 43, 44, 45, 46, 47, 48, 49, 50, 51, 52, 53, 54, 55, 56, 57, 58, 59, 60, 61, 62, 63, 64, 65, 66, 67, 68, 69, 70, 71, 72, 73, 74, 75, 76, 77, 78, 79, or 80 amino acids.

[0169] In some cases, peptides provided herein can comprise at least partial sequence identity to wildtype proteins. In some cases, peptides provided herein can comprise mutations as compared to a wildtype peptide sequence. In some cases, a peptide provided herein can comprise a continuous sequence having from about 7-17, 7-15, 7-10, 8-17, 8-15, 8-10, 9-17, 9-15, or 9-10 residues identical to a sequence provided in any one of SEQ ID NO: 1-9489 or a polypeptide recited in SEQ ID NO: 9521, 9522, 9526, 9530, or 9531. In some cases, at least a contiguous portion of the peptide or salt thereof can comprise a sequence with at least about: 70%, 75%, 80%, 85%, 90%, 91%, 92%, 93%, 94%, 95%, 96%, 97%, 98%, 99%, or 100% sequence identity to a polypeptide recited in SEQ ID NO: 1-9489. In some cases, a peptide or salt thereof can comprise a sequence with at least about: 70%, 75%, 80%, 85%, 90%, 91%, 92%, 93%, 94%, 95%, 96%, 97%, 98%, 99%, or 100% sequence identity to a polypeptide recited in SEQ ID NO: 9521, 9522, 9526, 9530, 9531 or 9701. In some cases, a peptide provided herein comprises less than about 10, 9, 8, 7, 6, 5, 4, 3, 2, or 1 residue difference to a polypeptide provided in any one of SEQ ID NO: 1-9489. In some cases, a peptide comprises 70%, 75%, 80%, 85%, 90%, 91%, 92%, 93%, 94%, 95%, 96%, 97%, 98%, 99%, or 100% sequence identity to the polypeptide of SEQ ID NO 9530.

[0170] In some embodiments, a peptide or salt thereof can modulate expression level of a target protein. In some cases, a target protein can be implicated in a disease or condition. Non-limiting examples of suitable genes that can encode a target protein are provided in Table 7.

[0171] In some instances, a target protein can comprise an enzyme or fragment thereof. In some instances, a target protein can comprise, a kinase, a phosphatase, a signaling peptide, a transcription factor, or any combination thereof. In some cases, a target protein can comprise an oxidoreductase, a hydrolase, a transferase, a lyase, an isomerase, or a ligase. In some cases, a target protein can be encoded by a gene in Table 7 or a variant of a gene in Table 7 or a fragment of any of these. Table 7 comprises non-limiting exemplary genes that can encode for a target protein.

[0172] In some cases, a peptide or salt thereof can modulate a target protein. Modulation of a target protein by a peptide or salt thereof can comprise at least a partial inhibition, reduction, or total elimination of activity. In some cases, modulation can comprise at least a partial increase in activity. In some cases, modulation can be achieved by at least partially inhibiting or activating protein to protein interaction. In some cases, a protein to protein interaction can comprise a ligand to receptor interaction. In some instances, a protein to protein interaction can comprise a regulatory protein complex. In some cases, a peptide or salt thereof can at least partially reduce a protein to nucleic acid interaction.

TABLE 7
Exemplary genes that encode exemplary target proteins:

| | | | |
|---|---|---|---|
| MCL-1 | CRLF2 | PCDH15 | POMGNT1 |
| BCR | DSE | PTGFR | RYR2 |
| BRAF | EXT1 | SGCD | STAG2 |
| JAK1 | FMR1 | TMEM127 | GNAQ |
| JAK2 | AKAP9 | HSPH1 | KDR |
| VEGF | ATRX | LRPPRC | MITF |
| EGFR | CBS | MYC | NOTCH1 |
| ALK | CRTAP | PCGF2 | POMT1 |
| CDK1 | DSG2 | PTPN11 | S1PR2 |
| CDK2 | EXT2 | SGSH | STAR |
| CDK3 | FUBP1 | TMEM43 | GNAS |
| CDK3 | AKT1 | IDH1 | KEAP1 |
| CDK4 | AXIN1 | LRRK2 | MKS1 |
| BRCA | CCDC178 | MYD88 | NOTCH2 |
| PIK3CA | CRYAB | PDE11A | POU1F1 |
| MEK | DSP | PTPN12 | SAMD9L |
| C-KIT | EYA4 | SH2B3 | STK11 |
| NRAS | FZD3 | TMEM67 | GNPTAB |
| ABCB11 | AKT2 | IDH2 | KIF1B |
| ANTXR2 | AXIN2 | LYST | MLH1 |
| BCOR | CCNE1 | MYH6 | NPC1 |
| CDKN1B | CSF1R | PDGFRA | POU6F2 |
| CYP27A1 | DTNA | RAC1 | SBDS |
| EMD | EZH2 | SLC25A4 | SUFU |
| FANCF | G6PC | TMPO | GPC3 |
| ABCC8 | ALB | IGF2R | KIT |
| APC | BAG3 | MAP2K1 | MLH3 |
| BCORL1 | CD79A | MYH7 | NPC2 |
| CDKN2A | CSMD3 | PDHA1 | PPM1L |
| CYP27B1 | ECT2L | RAD21 | SCN11A |
| EP300 | F11 | SLC26A2 | SUZ12 |
| FANCG | GAA | TNFAIP3 | GPC6 |
| ABCC9 | ALDH3A2 | IGHMBP2 | KLF6 |
| AR | BAI3 | MAP2K2 | MMAB |
| BLM | CD79B | MYL2 | NPHP1 |
| CEP290 | CSRP3 | PDZRN3 | PPP2R1A |
| DAXX | EDA | RAD50 | SCN5A |
| EPCAM | F5 | SLC37A4 | SYNE3 |
| FANCI | GABRA6 | TNFRSF14 | GPR78 |
| ABCD1 | ALDOB | IGSF10 | KLHDC8B |
| ARID1A | BAP1 | MAP2K4 | MPL |
| BMPR1A | CD96 | MYL3 | NPHP4 |
| CFTR | CTNNB1 | PEX1 | PPT1 |
| DBT | EDN3 | RAD51B | SCNN1A |
| EPHA5 | FAH | SLC7A8 | TAZ |
| FANCL | GALNT12 | TNNC1 | GRIN2A |
| ABL1 | ALK | IKBKAP | KMT2A |
| ARID2 | BARD1 | MAP3K1 | MPZ |
| RAFI | CDC27 | MYLK2 | NPM1 |
| CHEK1 | CTNS | PEX7 | PRDM1 |
| DCC | EDNRB | RAD51C | SCNN1B |
| EPHB2 | FAM46C | SLC9A9 | TBX20 |
| FANCM | GALT | TNNI3 | GRM8 |
| ACADM | ALS2 | IKZF1 | KMT2C |
| ARSA | BAX | MAP4K3 | MRE11A |
| BRCA1 | CDC73 | MYO1B | PRKAG2 |
| CHEK2 | CTSK | PHF6 | SCNN1G |
| DCX | EED | RAD51D | TCAP |
| ERBB2 | FANCA | SLX4 | GXYLT1 |
| FAS | GATA1 | TNNT1 | KMT2D |
| CADS | AMER1 | IKZF4 | MSH2 |
| ASAH1 | BAZ2B | MAP7 | NRCAM |
| BRCA2 | CDH1 | MYO7A | PRKAR1A |
| CHM | CUBN | PIK3CA | SCO2 |
| DDB2 | EGFR | RARB | TCERG1 |
| ERBB3 | FANCB | SMAD2 | H3F3A |
| FAT3 | GATA2 | TNNT2 | KRAS |
| ACADVL | AMPD1 | IL2RG | MSH3 |
| ASCC1 | BCKDHA | MAPK10 | NTRK1 |
| BRIP1 | CDH23 | MYOZ2 | PRKDC |
| CIC | CYLD | PIK3CG | SDHA |
| DDR2 | EGR2 | RB1 | TCF7L2 |
| ERBB4 | FANCC | SMAD4 | HADHA |
| FBXO11 | GATA3 | TP53 | KREMEN1 |
| ACTC1 | AMPH | IL6ST | MSH6 |
| ASL | BCKDHB | MAS1L | NUP62 |
| BTD | CDK12 | MYPN | PROC |
| CLN3 | CYP11A1 | PIK3R1 | SDHAF2 |
| DES | EHBP1 | RBM20 | TERT |
| ERCC2 | FANCD2 | SMARCA4 | HADHB |
| FBXO32 | GATAD1 | TPM1 | L1CAM |
| ACTN2 | ANTXR1 | IL7R | MSMB |
| ASPA | BCL6 | MAX | OR5L1 |
| BTK | CDK4 | NBN | PROP1 |
| CLN5 | CYP21A2 | PKHD1 | SDHB |
| DHCR7 | ELMO1 | RECQL4 | TET2 |
| ERCC3 | FANCE | SMARCB1 | HBB |
| FBXW7 | GBA | TPP1 | LAMA2 |
| ACVR1B | GCDH | INVS | MSR1 |
| ASS1 | JAK1 | MC1R | OTC |
| BUB1B | MDM2 | NCOA3 | PRPF40B |
| CLN6 | NEK2 | PKP2 | SDHC |
| DICER1 | PLOD1 | RET | TFG |
| ERCC4 | ROS1 | SMC1A | HESX1 |
| FGD4 | SMPD1 | TRAF5 | LAMA4 |
| ADA | GJB2 | IRAK4 | MTAP |
| ASXL1 | JAK2 | MCCC2 | OTOP1 |
| CALR3 | MECP2 | NCOR1 | PRX |
| CLN8 | NEXN | PLEKHG5 | SDHD |
| DIS3L2 | PLP1 | RHBDF2 | TGFB3 |
| ERCC5 | RPGRIP1L | SMC3 | HEXA |
| FGFR1 | SOX10 | TRIO | LAMP2 |
| ADAMTS13 | GLA | ITCH | MTHFR |
| ATM | JAK3 | MCOLN1 | PAH |
| CARD11 | MED12 | NDUFA13 | PSAP |
| COL1A2 | NF1 | PLN | SEPT9 |
| DKC1 | PMP22 | RNASEL | TGFBR1 |
| ERCC6 | RS1 | SMO | HEXB |
| FGFR2 | SOX2 | TRPV4 | LDB3 |
| ADAMTS2 | GLB1 | TRRAP | MTM1 |
| ATP4A | JUP | U2AF1 | PALB2 |
| CASP8 | MEFV | USH1C | PSEN1 |
| COL4A3 | NF2 | WAS | SETBP1 |
| DLD | PMS2 | WWP1 | TGFBR2 |
| ERRFI1 | RSPO1 | ZIC3 | HFE |
| FGFR3 | SPEG | TSC1 | LEPRE1 |
| AGA | GLI1 | U2AF2 | MTOR |
| ATP6V0D2 | KAT6A | USH1G | PALLD |
| CAV3 | MEN1 | WBSCR17 | PSEN2 |
| COL4A4 | NFE2L2 | XPA | SETD2 |
| DMD | POLD1 | ZNF2 | THSD7B |
| ESCO2 | RTEL1 | TSC2 | HGSNAT |
| FH | SPOP | UBA1 | LIG4 |
| AGL | GLI3 | USP16 | MUC16 |
| ATP7A | KCNQ1 | WEE1 | PAX5 |
| CBFB | MET | XPC | PTCH1 |
| COL7A1 | NFKBIA | ZNF226 | SF1 |
| DNAJB2 | POLE | TSHB | TINF2 |
| ESR1 | RUNX1 | UBR3 | HIST1H3B |
| FKTN | SRC | USP25 | LMNA |
| AGPS | GLMN | WNK2 | MUT |
| ATP7B | KDM4B | XRCC3 | PAX6 |
| CBL | MFSD8 | ZNF473 | PTCH2 |
| COX15 | NIPA2 | TSHR | SF3A1 |
| DNMT3A | POLH | UROD | TMC6 |
| ETV6 | RUNX1T1 | VCL | HNF1A |
| FLCN | SSTR1 | WRN | LPAR2 |
| AHI1 | GNA11 | ZBED4 | MUTYH |
| ATP8B1 | KDM6A | ZNF595 | PBRM1 |
| CBLB | MIER3 | TTN | PTEN |
| CREBBP | NKX3-1 | UROS | SF3B1 |
| DSC2 | AIP | VHL | TMC8 |
| EXOC2 | ATR | WT1 | HRAS |
| FLT3 | CBLC | ZFHX3 | LRP1B |
| ARAF | ZRSR2 | HER2 | MYBPC3 |

[0173] In some cases, modulation of expression level can be determined using an in vitro assay. In some cases, modulation of activity can be measured relative to an amount of the target protein or activity by a target protein in a cell that has not been treated with a peptide or salt thereof. In some cases, an assay can be utilized to measure kinase activity or phosphatase activity of a target protein. In some cases, kinase or phosphatase activity can be determined by evaluating activity of proteins downstream from the target protein. Downstream proteins can comprise proteins that can interact with a target protein directly or indirectly. In some cases, a downstream protein is at least about 1, 2, 3, 4, 5, 6, 7, 8, 9, or up to 10 proteins removed from the target protein in a pathway of a cell.

[0174] Any in vitro assay can be utilized in a method provided herein. In some cases, an in vitro assay comprises a Western blot, PCR, RNA sequencing, Northern blot, qPCR, ELISA, flow cytometry, fluorescence staining, and any combination thereof.

[0175] In some cases, a peptide or salt thereof can produce an at least partial increase or an at least partial decrease of an activity of a downstream protein. Any downstream protein of any target protein provided herein can be evaluated, for example downstream proteins of any proteins encoded by the genes in Table 7. In some cases, a target protein is RAF1. In some instances, a downstream protein of Rafl can comprise MEK1/2, ERK1/2, AP-1 or any combination thereof. In some cases, a target protein comprises EGFR. In some cases, a downstream protein of EGFR can comprise NcK, PAK, PI3K, Ras or any combination thereof. In some instances, a downstream protein of EGFR can comprise a pathway such as proteins that comprise the PI3K pathway which can include PDK-1, Akt, mTOR, and S6K. Another example of a downstream protein pathway for EGFR can be the Pak pathway which can comprise NcK, MKK3/6, JNK, P38, c-Fos, and c-Jun. In some cases, a downstream protein can comprise a transcriptional regulator such as STATS.

[0176] In some cases, a peptide of salt thereof can have anti-cancer activity. Anti-cancer activity can refer to reduction or elimination of cancer. In some cases, anti-cancer activity can comprise killing of a cancer cell. Anti-cancer activity can be determined in vivo or in vitro. In some cases, a cancer cell, such as a cancer cell line can be utilized. Suitable cancer cells for use in methods provided herein can comprise in vitro cell lines or primary cancer cells. In some cases, a peptide or salt thereof can modulate an expression level of a target protein. Modulation can be determined utilizing an assay or mouse model to determine a level of killing of a cancer cell.

[0177] In some cases, provided herein can be partial increases or partial decreases of an activity of a target protein. Increases or decreases can refer to at least about a 1-fold, 2-fold, 3-fold, 4-fold, 5-fold, 6-fold, 7-fold, 8-fold, 9-fold, 10-fold, 15-fold, 20-fold, 30-fold, 50-fold, 100-fold, 150-fold, 175-fold, 200-fold, 250-fold, 300-fold, 400-fold, 500-fold, 800-fold, or up to about 1000-fold change in an activity as compared to a comparable method that lacks treatment with a peptide or salt thereof. In some cases, a partial increase or a partial decrease can refer to about: 1%, 5%, 10%, 20%, 40%, 60%, 80%, 100%, 150%, 200%, 250%, 300%, 350%, 400%, or up to about a 500% increase or decrease in an activity of a target protein. In some embodiments, a peptide or salt thereof can comprise independently Gly, or an amino acid comprising a C₁-C₁₀ alkyl, a C₁-C₁₀ alkenyl, a C₁-C₁₀ alkynyl, a cycloalkyl, or an alkylcycloalkyl side chain. In some cases, a peptide can comprise an amino acid comprising an aromatic side chain. In some cases, a peptide can comprise an amino acid comprising a side chain that can be at least partially protonated or at least partially deprotonated at a pH of about 7.3. In some cases, an amino acid of the peptide or salt thereof positioned at an end terminus comprises a side chain that can be at least partially deprotonated at a pH of about 7.3. In some cases, a peptide can comprise an amino acid comprising an amide containing side chain. In some cases, a peptide can comprise an amino acid comprising an alcohol or thiol containing side chain. In some cases, a peptide or salt thereof can comprise a recombinant peptide.

[0178] In some embodiments, a peptide can be an engineered peptide. In some cases, a peptide can be a natural peptide, a synthetic peptide, an artificial peptide, a modified peptide, or any combination thereof. In some embodiments, a peptide can comprise a chemical modification, such as an acetylation, a sulfonation, an amidation, or an esterification. In some cases, a peptide can comprise a stapled peptide or salt thereof, a stitched peptide or salt thereof, a macrocyclic peptide or salt thereof, or any combination thereof. In some instances, a stapled peptide can comprise a covalent linkage between two amino acid side-chains. In some instances, a stapled peptide can comprise an alpha-helix. A stitched peptide or salt thereof can comprise multiple staples, for example a stitched peptide can comprise a plurality of covalent linkages between different amino acid side-chains on a peptide. In some cases, a macrocyclic peptide can comprise a ring structure, or a bicyclic structure. In some instances, a macrocyclic peptide can comprise a head-to-tail, a side-chain-to-side-chain, or both, structure.

[0179] In some embodiments, a peptide provided herein can further comprise a linker. A linker can provide desirable flexibility to permit the desired expression, activity and/or conformational positioning of a peptide. A linker can be of any appropriate length and is preferably designed to be sufficiently flexible so as to allow the proper folding and/or function and/or activity of one or both of the domains it connects. In some cases, a linker can have a length of at least 3, 5, 10, 15, 20, 25, 30, 35, 40, 45, 50, 55, 60, 65, 70, 75, 80, 85, 90, 95, or 100 residues. In some embodiments, a linker has a length from about 0 to 200 residues, from about 10 to 190 residues, from about 20 to 180 residues, from about 30 to 170 residues, from about 40 to 160 residues, from about 50 to 150 residues, from about 60 to 140 residues, from about 70 to 130 residues, from about 80 to 120 residues, or from about 90 to 110 residues. In some embodiments, a linker can comprise an endogenous protein sequence. In some embodiments, a linker sequence comprises glycine, alanine, or serine amino acid residues, or any combination of glycine, alanine, and serine amino acid residues. In some embodiments, a linker can contain motifs, e.g., multiple or repeating motifs, of GS, GGS, GGGGS, GGSG, or SGGG. In some cases, a linker sequence can include any naturally occurring amino acids, non-naturally occurring amino acids, or combinations thereof. In some cases, a linker can be a cleavable linker. In some cases, a linker can at least in part be resistant to cleavage. In some cases, a resistant cleavage linker can comprise a thioether linker, a maleimide alkane linker, a maleimide cyclohexane linker, or any combination thereof. In some cases, a cleavable linker can comprise an enzymatically cleavable linker, a chemically cleavable linker, or both. A cleavable linkage can comprise an acid-labile linker, a reducible linker, a disulfide-linker, a hydrazone linker, a peptide linker, or any combination thereof. In some cases, a cleavable linker can be linked to an antibody or a fragment thereof. In some cases, a cleavable linker can be linked to a cell penetrating peptide. In some cases, a peptide can be directly or indirectly linked to a cell penetrating peptide. A cell penetrating peptide can be a short polypeptide that can allow for increased uptake of a subject composition into a cell. A cell penetrating peptide can be cationic, amphipathic, hydrophobic, and combinations thereof. In some instances, a cell penetrating peptide can comprise a TAT peptide, a MPG peptide, a Pep-1 peptide, a KALA peptide, a SV40 NLS peptide, an Arg polypeptide, a TfR targeting peptide, a rabies virus glycoprotein, or a penetratin peptide. A cell penetrating peptide can be of any length. In some cases, a cell penetrating peptide can be about 3 amino acids to about 50 amino acids long, about 5 amino acids to about 15 amino acids long, about 10 amino acids to about 25 amino acids long, about 20 amino acids to about 30 amino acids long, or about 30 amino acids to about 50 amino acids long. In some cases, a cell penetrating peptide can comprise a peptide that comprises L-amino acids, D- amino acids, both L and D amino acids, and non-natural amino acids. In some cases, a cell penetrating peptide can comprise a cyclic peptide. In some instances, a cell penetrating peptide can comprise a poly-arginine stretch.

[0180] In some embodiments, a method provided herein can be utilized for screening. In some cases, a method can be used to screen genes or proteins encoded by genes for inhibitory or stimulatory activity. In some cases, a method can comprise expressing at least a fragment of a gene in a target cell. In some embodiments, a method of screening for at least partially reducing or at least partially increasing the activity of a target protein, a protein that may interact downstream with a target protein, or both can comprise expressing one or more fragments of a gene in a target cell. In some cases, a gene fragment can be expressed from a vector, such as a polynucleotide (e.g., a plasmid) or a viral vector comprising a nucleic acid encoding the gene fragment. In some instances, a gene fragment can comprise at least a portion of a target protein. In some cases, a gene fragment can be from: about 20 nucleotides to about 1000 nucleotides, about 20 nucleotides to about 100 nucleotides, about 100 nucleotides to about 500 nucleotides, about 60 nucleotides to about 150 nucleotides, or about 500 nucleotides to about 1000 nucleotides in length. In some cases, a method of at least partially reducing the activity of a target protein or at least partially reducing the activity of a protein that interacts downstream with a target protein can comprise measuring the at least partial reduction of activity by determining a change in gene expression of a treated cell relative to the level of a gene expression in an untreated cell in an in vitro assay. In some cases, a method of screening for at least partially reducing or at least partially increasing the activity of a target protein, a protein that may interact downstream with a target protein, or both can comprise measuring the at least partial reduction of activity by determining a change in gene expression of a treated cell relative to the level of a gene expression in an untreated cell in an in vitro assay. In some cases, a change in gene expression can be determined by quantitative reverse transcriptase polymerase chain reaction, RNA-seq or both. In some instances, a target protein can be selected from a protein encoded by a gene or a variant thereof recited in Table 7. In some cases, a fragment of a gene can encode for a polypeptide comprising a sequence having at least about: 70%, 75%, 80%, 85%, 90%, 95%, 98%, or 99% sequence homology to any one of the peptides of SEQ ID Nos: 1-9489. In some cases, a vector or plasmid can be transfected, electroporated, or transduced into the target cell. In some cases, at least a portion of the target protein can comprise about: 5 amino acids to about 80 amino acids, 5 amino acids to about 20 amino acids, 10 amino acids to about 40 amino acids, 20 amino acids to about 60 amino acids, 20 amino acids to about 50 amino acids, or about 40 amino acids to about 80 amino acids. In some instances, reduction of activity can comprise reduced cell growth.

[0181] In some cases, a pharmaceutical composition can comprise a nucleic acid at least partially encoding a peptide described herein. In some cases, a nucleic acid can at least partially encode a peptide that can have at least about: 70%, 75%, 80%, 85%, 90%, 95% or 99% sequence identity to a polypeptide of SEQ ID NO: 1-9489. In some cases, the peptide may not comprise more than: about 10 amino acids to about 60 amino acids, about 10 amino acids to about 20 amino acids, about 20 amino acids to about 30 amino acids, about 30 amino acids to about 40 amino acids, about 40 amino acids to about 50 amino acids, or about 50 amino acids to about 60 amino acids. In some instances, a nucleic acid can comprise a pharmaceutical composition in unit dose form. In some cases, a nucleic acid can comprise DNA, RNA, or both. In some cases, a nucleic acid can be circular, such as a plasmid. A nucleic acid can be single stranded, double stranded, or both.

[0182] In some cases, a pharmaceutical composition can comprise a vector. A vector can comprise or can encode for a peptide described herein, for example a peptide for use in a pharmaceutical composition. In some instances, a vector can comprise a nucleic acid. In some cases, a vector can comprise a polypeptide coat. In some cases, a vector can be a viral vector, a virus-like particle. In some cases, the vector can comprise an RNA viral vector which can include but may not be limited to a retrovirus, lentivirus, coronavirus, alphavirus, flavivirus, rhabdovirus, morbillivirus, picornavirus, coxsackievirus, or picornavirus or portions of any of these, or fragments of any of these, or any combination thereof. In some cases, a vector can comprise a lentiviral vector. In some cases, a vector can comprise a DNA viral vector which can include but may not be limited to an adeno-associated viral (AAV) vector, adenovirus, hybrid adenoviral system, hepadnavirus, parvovirus, papillomavirus, polyomavirus, herpesvirus, poxvirus, a portion of any of these, or a fragment of any of these, or any combination thereof. In some cases, a vector can comprise an AAV vector. An AAV vector, can be of any serotype. In some cases, an AAV vector is of a serotype selected from any one of: AAV1, AAV2, AAV3, AAV4, AAVS, AAV6, AAV7, AAV8, AAV9, AAV10, AAV11, AAV12, AAVDJ, variants thereof, and any combination thereof. In some cases, a vector is of AAV2, AAV5, AAV9, or combinations thereof. Provided herein are also modified vectors that comprise mutations or modifications of components such as modified REP, CAP, ITRs, or combinations thereof. In some cases, chimeras of AAV vectors are also employed in methods and compositions provided herein.

[0183] Compositions provided herein can be delivered via any means. In some cases, composition is delivered via a vector. In some cases, a vector can comprise a polypeptide coat. In some cases, a vector can comprise a liposome, a nanoparticle, a microparticle, or any combination thereof. In some cases, a liposome can include but may not be limited to a unilamellar liposome, multilamellar liposome, archaeosome, noisome, novasome, cryptosome, emulsome, vesosome, or a derivative of any of these, or any combination thereof. In some cases, a vector comprises a nanoparticle. A nanoparticle, can include but may not be limited to a biopolymeric nanoparticle, an alginate nanoparticle, a xanthan gum nanoparticle, a cellulose nanoparticle, a dendrimer, a polymeric micelle, polyplexed, an inorganic nanoparticle, a nanocrystal, a metallic nanoparticle, a quantum dot, a protein nanoparticle, a polysaccharide nanoparticle, or a derivative of any of these, or any combination thereof.

[0184] Provided herein can also be a kit. A kit can comprise a pharmaceutical composition described herein, a nucleic acid described herein, a peptide described herein, a vector described herein or any combination thereof. In some cases, a kit can comprise instructions that recite the methods of using a pharmaceutical composition described herein, a nucleic acid described herein, a peptide described herein, the vector described herein or any combination thereof. In some cases, the kit can comprise instructions for administration to a subject in need thereof. In some embodiments, a kit can comprise a container, such as a plastic, a glass, or a metal container.

[0185] Also provided herein can be methods of making a pharmaceutical composition described herein. In some cases, the methods can comprise contacting a peptide or salt thereof with a pharmaceutically acceptable excipient, diluent or carrier.

[0186] In some embodiments, a pharmaceutical composition described herein can be administered in a therapeutically effective amount to a subject (e.g., a human) in need thereof to at least partially prevent or treat a disease or condition. In some cases, treating can comprise at least partially reducing or ameliorating at least one symptom of the disease or condition, such as reducing a growth of a tumor. The terms “treating,” “treatment,” and the like can be used herein to mean obtaining a desired pharmacologic effect, physiologic effect, or any combination thereof. In some instances, a treatment can reverse an adverse effect attributable to the disease or disorder. In some cases, the treatment can stabilize the disease or disorder. In some cases, the treatment can delay progression of the disease or disorder. In some instances, the treatment can cause regression of the disease or disorder. In some instances, the treatment can prevent the occurrence of the disease or disorder. In some embodiments, a treatment's effect can be measured. In some cases, measurements can be compared before and after administration of the composition. For example, a subject can have medical images prior to treatment compared to images after treatment to show cancer regression. In some instances, a subject can have an improved blood test result after treatment compared to a blood test before treatment. In some instances, measurements can be compared to a standard.

[0187] In some embodiments, a disease or condition can comprise cancer. In some cases, a cancer can comprise a sarcoma, a carcinoma, a melanoma, a lymphoma, a leukemia, a blastoma, a germ cell tumor, a myeloma, or any combination thereof. In some cases, cancer may comprise a thyroid cancer, adrenal cortical cancer, anal cancer, aplastic anemia, bile duct cancer, bladder cancer, bone cancer, bone metastasis, central nervous system (CNS) cancers, peripheral nervous system (PNS) cancers, breast cancer, Castleman's disease, cervical cancer, childhood Non-Hodgkin's lymphoma, lymphoma, colon and rectum cancer, endometrial cancer, esophagus cancer, Ewing's family of tumors (e.g. Ewing's sarcoma), eye cancer, gallbladder cancer, gastrointestinal carcinoid tumors, gastrointestinal stromal tumors, gestational trophoblastic disease, hairy cell leukemia, Hodgkin's disease, Kaposi's sarcoma, kidney cancer, laryngeal and hypopharyngeal cancer, acute lymphocytic leukemia, acute myeloid leukemia, children's leukemia, chronic lymphocytic leukemia, chronic myeloid leukemia, liver cancer, lung cancer, lung carcinoid tumors, Non-Hodgkin's lymphoma, male breast cancer, malignant mesothelioma, multiple myeloma, myelodysplastic syndrome, myeloproliferative disorders, nasal cavity and paranasal cancer, nasopharyngeal cancer, neuroblastoma, oral cavity and oropharyngeal cancer, osteosarcoma, ovarian cancer, pancreatic cancer, penile cancer, pituitary tumor, prostate cancer, retinoblastoma, rhabdomyosarcoma, salivary gland cancer, sarcoma (adult soft tissue cancer), melanoma skin cancer, non-melanoma skin cancer, stomach cancer, testicular cancer, thymus cancer, uterine cancer (e.g. uterine sarcoma), vaginal cancer, vulvar cancer, or Waldenstrom's macroglobulinemia.

[0188] In some cases, a cancer can include a hyperproliferative disorder. Hyperproliferative disorders can include but may not be limited to cancers, hyperplasia, or neoplasia. In some cases, the hyperproliferative cancer can be breast cancer such as a ductal carcinoma in duct tissue of a mammary gland, medullary carcinomas, colloid carcinomas, tubular carcinomas, and inflammatory breast cancer; ovarian cancer, including epithelial ovarian tumors such as adenocarcinoma in the ovary and an adenocarcinoma that has migrated from the ovary into the abdominal cavity; uterine cancer; cervical cancer such as adenocarcinoma in the cervix epithelial including squamous cell carcinoma and adenocarcinomas; prostate cancer, such as a prostate cancer selected from the following: an adenocarcinoma or an adenocarcinoma that has migrated to the bone; pancreatic cancer such as epithelioid carcinoma in the pancreatic duct tissue and an adenocarcinoma in a pancreatic duct; bladder cancer such as a transitional cell carcinoma in urinary bladder, urothelial carcinomas (transitional cell carcinomas), tumors in the urothelial cells that line the bladder, squamous cell carcinomas, adenocarcinomas, and small cell cancers; leukemia such as acute myeloid leukemia (AML), acute lymphocytic leukemia, chronic lymphocytic leukemia, chronic myeloid leukemia, hairy cell leukemia, myelodysplasia, myeloproliferative disorders, acute myelogenous leukemia (AML), chronic myelogenous leukemia (CML), mastocytosis, chronic lymphocytic leukemia (CLL), multiple myeloma (MM), and myelodysplastic syndrome (MDS); bone cancer; lung cancer such as non-small cell lung cancer (NSCLC), which may be divided into squamous cell carcinomas, adenocarcinomas, and large cell undifferentiated carcinomas, and small cell lung cancer; skin cancer such as basal cell carcinoma, melanoma, squamous cell carcinoma and actinic keratosis, which may be a skin condition that sometimes develops into squamous cell carcinoma; eye retinoblastoma; cutaneous or intraocular (eye) melanoma; primary liver cancer (cancer that begins in the liver); kidney cancer; autoimmune deficiency syndrome (AIDS)-related lymphoma such as diffuse large B-cell lymphoma, B-cell immunoblastic lymphoma and small noncleaved cell lymphoma; Kaposi's Sarcoma; viral-induced cancers including hepatitis B virus (HBV), hepatitis C virus (HCV), and hepatocellular carcinoma; human lymphotropic virus-type 1 (HTLV-1) and adult T-cell leukemia/lymphoma; and human papilloma virus (HPV) and cervical cancer; central nervous system (CNS) cancers such as primary brain tumor, which includes gliomas (astrocytoma, anaplastic astrocytoma, or glioblastoma multiforme), oligodendrogliomas, ependymomas, meningiomas, lymphomas, schwannomas, and medulloblastomas; peripheral nervous system (PNS) cancers such as acoustic neuromas and malignant peripheral nerve sheath tumors (MPNST) including neurofibromas and schwannomas, malignant fibrous cytomas, malignant fibrous histiocytomas, malignant meningiomas, malignant mesotheliomas, and malignant mixed MUllerian tumors; oral cavity and oropharyngeal cancer such as hypopharyngeal cancer, laryngeal cancer, nasopharyngeal cancer, and oropharyngeal cancer; stomach cancer such as lymphomas, gastric stromal tumors, and carcinoid tumors; testicular cancer such as germ cell tumors (GCTs), which include seminomas and nonseminomas, and gonadal stromal tumors, which include Leydig cell tumors and Sertoli cell tumors; thymus cancer such as to thymomas, thymic carcinomas, Hodgkin disease, non-Hodgkin lymphomas carcinoids or carcinoid tumors; rectal cancer; and colon cancer. In some cases, a cancer can comprise a malignant thyroid disorder such as for example a follicular carcinoma, a follicular variant of papillary thyroid carcinomas, a medullary carcinoma, or a papillary carcinoma.

[0189] In some cases, a disease or condition is not cancer. In some cases, a disease or condition is acute. In other cases, a disease or condition is chronic. Suitable diseases and conditions may affect adults or pediatric subjects. A disease or condition may affect the brain, eyes, lungs, liver, bladder, kidneys, heart, stomach, intestines, or combinations thereof. Non-limiting examples of diseases and conditions comprise: autoimmune, allergy, asthma, celiac, Chrohn's, colitis, heart disease, liver disease, kidney disease, lupus, rheumatoid arthritis, scleroderma, polychondritis, macular degeneration, schizophrenia, ataxia, myotonic dystrophy, Alzheimer's, Huntington's, Kennedy's, fragile X syndrome, Autism, Inflammation, ALS, drug addiction, hemophilia, thalassemia, factor X deficiency, anemia, SCID, neuropathy, cystic fibrosis, cirrhosis, osteoporosis, atrophy, diabetes, stroke, hepatitis, epilepsy, COPD, meningitis, metabolic disease, and combinations thereof.

[0190] In some embodiments, a subject may have been diagnosed with a disease or condition. In some cases, the subject may have been diagnosed prior to treating with a peptide or pharmaceutical composition thereof disclosed herein. In some cases, diagnosing a subject with a disease or condition can comprise diagnosing with a physical examination, a biopsy, a metabolite test, a radiological image, a blood test, a urine test, an antibody test, or any combination thereof. In some instances, a radiological image can comprise a computed tomography (CT) image, a nuclear scan, an X-Ray image, a magnetic resonance image (MRI), an ultrasound image, or any combination thereof.

[0191] In some embodiments, the method can comprise administering a second therapy. In some cases, a second therapy can comprise an antibiotic, an antiviral, a cancer treatment, a neurological treatment, a steroid, an anti-inflammatory treatment, or any combination thereof. In some instances, a second therapy can comprise surgery, chemotherapy, radiation therapy, immunotherapy, hormone therapy, a checkpoint inhibitor, targeted drug therapy, adoptive immunotherapy, anti-angiogenic agents, chimeric antigen receptor (CAR) T-cell therapy, gene editing therapy, a protein knockdown therapy, RNA editing therapy, or any combination thereof.

[0192] In some embodiments, a pharmaceutical composition can be in unit dose form. In some embodiments, compositions disclosed herein can be in unit dose forms or multiple-dose forms. Unit dose forms, as used herein, can refer to physically discrete units suitable for administration to human or non-human subjects (e.g., animals). In some cases, a nucleic acid or a peptide is present in a composition in a range of from about 1 mg to about 2000 mg; from about 5 mg to about 1000 mg, from about 10 mg to about 25 mg to 500 mg, from about 50 mg to about 250 mg, from about 100 mg to about 200 mg, from about 1 mg to about 50 mg, from about 50 mg to about 100 mg, from about 100 mg to about 150 mg, from about 150 mg to about 200 mg, from about 200 mg to about 250 mg, from about 250 mg to about 300 mg, from about 300 mg to about 350 mg, from about 350 mg to about 400 mg, from about 400 mg to about 450 mg, from about 450 mg to about 500 mg, from about 500 mg to about 550 mg, from about 550 mg to about 600 mg, from about 600 mg to about 650 mg, from about 650 mg to about 700 mg, from about 700 mg to about 750 mg, from about 750 mg to about 800 mg, from about 800 mg to about 850 mg, from about 850 mg to about 900 mg, from about 900 mg to about 950 mg, or from about 950 mg to about 1000 mg. In some cases, a dose of a composition provided herein is at least about or at most about: 10,000, 15,000, 20,000, 22,000, 24,000, 25,000, 30,000, 40,000, 50,000, 60,000, 70,000, 80,000, 90,000, 100,000, 125,000, 150,000, 200,000, or 500,000 units/kg body weight. In some embodiments, a therapeutically effective dose is at most about 10,000, 15,000, 20,000, 22,000, 24,000, 25,000, 30,000, 40,000, 50,000, 60,000, 70,000, 80,000, 90,000, 100,000, 125,000, 150,000, 200,000, or 500,000 units/kg body weight. Any one of the described dosages can be determined using the 95% CI for plasma volumes and body surface areas in males and females and an 10×IC50 (to achieve an about IC90 concentration, based on the shapes of a killing curves). In some cases, a dose range is from about 17-440 micromoles/m\hat{ }2 (body surface area) per peptide. In some cases, a dosage is at least or at most about: 15, 25, 35, 45, 55, 65, 75, 85, 95, 105, 115, 125, 135, 145, 155, 165, 175, 185, 195, 205, 215, 225, 235, 245, 255, 265, 275, 285, 295, 305, 315, 325, 335, 345, 355, 365, 375, 385, 395, 405, 415, 425, 435, 445, 455, 465, 475, 485, 495, or up to about 500 micromoles/m\hat{ }2 (body surface area) per peptide.

[0193] In some cases, unit dose forms can be packaged individually. Each unit dose can contain a predetermined quantity of an active ingredient(s) that can be sufficient to produce the desired therapeutic effect in association with pharmaceutical carriers, diluents, excipients, or any combination thereof. Examples of unit dose forms can include, ampules, syringes, and individually packaged tablets and capsules. In some instances, a unit dose form can be comprised in a disposable syringe. In some instances, unit-dosage forms can be administered in fractions or multiples thereof. A multiple-dose form can be a plurality of identical unit dose forms packaged in a single container, which can be administered in segregated a unit dose form. Examples of a multiple-dose form can include vials, bottles of tablets or capsules, or bottles of pints or gallons. In some instances, a multiple-dose form can comprise the same pharmaceutically active agents. In some instances, a multiple-dose form can comprise different pharmaceutically active agents.

[0194] In some embodiments, a pharmaceutical composition can comprise: a peptide or salt thereof; and at least one of: an excipient, a diluent, or a carrier.

[0195] Administration or application of a composition disclosed herein can be performed on any animal, such as a human, a non-human primate, a pet (e.g., a dog, a cat), or a farm animal (a horse, a cow, a goat, a pig). In some cases, administration or application of a composition disclosed herein can be performed on a human. In some cases, a human can be from about 1 day to about 1 month old, from about 1 month to about 12 months old, from about 1 year to about 7 years old, from about 5 years to about 25 years old, from about 20 years to about 50 years old, from about 45 years to about 80 years old, or from about 75 years to about 130 years old.

[0196] Compositions described herein can be administered before, during, or after the occurrence of a disease or condition, and the timing of administering a composition can vary. For example, a pharmaceutical compositions can be used as a prophylactic and can be administered continuously to subjects with a propensity to conditions or diseases in order to prevent the occurrence of the disease or condition. Pharmaceutical compositions can be administered to a subject during or as soon as possible after the onset of the symptoms. The administration of the molecules can be initiated within the first 48 hours of the onset of the symptoms, within the first 24 hours of the onset of the symptoms, within the first 6 hours of the onset of the symptoms, or within 3 hours of the onset of the symptoms. The initial administration can be via any route practical, such as by any route described herein using any formulation described herein, such as by oral administration, topical administration, intravenous administration, inhalation administration, injection, catheterization, gastrostomy tube administration, intraosseous administration, ocular administration, otic administration, transdermal administration, oral administration, rectal administration, nasal administration, intravaginal administration, intracavernous administration, transurethral administration, sublingual administration, or a combination thereof. A composition can be administered as soon as is practicable after the onset of a disease or condition is detected or suspected, and for a length of time necessary for the treatment of the disease, such as, for example, from about 1 month to about 3 months. The length of treatment can vary for each subject. In some cases, a method can further comprise administering a second therapy in a therapeutically effective amount. A second therapy can be administered concurrently or consecutively to provided compositions.

[0197] Administration or application of a composition disclosed herein can be performed for a duration of at least about at least about: 1, 2, 3, 4, 5, 6, 7, 8, 9, 10, 11, 12, 13, 14, 15, 16, 17, 18, 19, 20, 21, 22, 23, 24, 25, 26, 27, 28, 29, 30, 31, 32, 33, 34, 35, 36, 37, 38, 39, 40, 41, 42, 43, 44, 45, 46, 47, 48, 49, 50, 51, 52, 53, 54, 55, 56, 57, 58, 59, 60, 61, 62, 63, 64, 65, 66, 67, 68, 69, 70, 71, 72, 73, 74, 75, 76, 77, 78, 79, 80, 81, 82, 83, 84, 85, 86, 87, 88, 89, 90, 91, 92, 93, 94, 95, 96, 97, 98, 99, 100, 150, 200, 300, 400, 500, 600, 700, 800, 900, 1000 days consecutive or nonconsecutive days. In some cases, the composition can be administered for life. In some embodiments, administration or application of the composition described herein can be from about 1 to about 30 days, from about 1 to about 60 days, from about 1 to about 90 days, from about 1 to about 300 days, from about 1 to about 3000 days, from about 30 days to about 90 days, from about 60 days to about 900 days, from about 30 days to about 900 days, or from about 90 days to about 1500 days. In some embodiments, administration or application of the composition described herein can be from: about 1 week to about 5 weeks, about 1 month to about 12 months, about 1 year to about 3 years, about 2 years to about 8 years, about 3 years to about 10 years, about 10 years to about 50 years, about 15 years to about 40 years, about 25 years to about 100 years, about 30 years to about 75 years, about 60 years to about 110 years, or about 50 years to about 130 years.

[0198] Administration or application of a composition disclosed herein can be performed for a duration of at least about 1 week, at least about 1 month, at least about 1 year, at least about 2 years, at least about 3 years, at least about 4 years, at least about 5 years, at least about 6 years, at least about 7 years, at least about 8 years, at least about 9 years, at least about 10 years, at least about 15 years, at least about 20 years, or for life. Administration can be performed repeatedly over a lifetime of a subject, such as once a day, once a week, or once a month for the lifetime of a subject. Administration can be performed repeatedly over a substantial portion of a subject's life, such as once a day, once a week, or once a month for at least about: 1 year, 5 years, 10 years, 15 years, 20 years, 25 years, 30 years, or more.

[0199] Administration or application of composition disclosed herein can be performed at least about: 1, 2, 3, 4, 5, 6, 7, 8, 9, 10, 11, 12, 13, 14, 15, 16, 17, 18, 19, 20, 21, 22, 23, or 24 times a in a 24-hour period. In some cases, administration or application of a composition disclosed herein can be performed continuously throughout a 24-hour period. In some embodiments, administration or application of composition disclosed herein can be performed at least about: 1, 2, 3, 4, 5, 6, 7, 8, 9, 10, 11, 12, 13, 14, 15, 16, 17, 18, 19, 20, or 21 times a week. In some cases, administration or application of a composition disclosed herein can be performed at least about: 1, 2, 3, 4, 5, 6, 7, 8, 9, 10, 11, 12, 13, 14, 15, 16, 17, 18, 19, 20, 21, 22, 23, 24, 25, 26, 27, 28, 29, 30, 31, 32, 33, 34, 35, 36, 37, 38, 39, 40, 41, 42, 43, 44, 45, 46, 47, 48, 49, 50, 51, 52, 53, 54, 55, 56, 57, 58, 59, 60, 61, 62, 63, 64, 65, 66, 67, 68, 69, 70, 71, 72, 73, 74, 75, 76, 77, 78, 79, 80, 81, 82, 83, 84, 85, 86, 87, 88, 89, 90, or more times a month. In some embodiments, a composition can be administered as a single dose or as divided doses. For example, administration of a capsule, or a tablet an comprise administration of more than one capsules or tablets. In some cases, the compositions described herein can be administered at a first time point and a second time point. In some embodiments, a composition can be administered such that a first administration can be administered before the other with a difference in administration time of about: 1 hour, 2 hours, 4 hours, 8 hours, 12 hours, 16 hours, 20 hours, 1 day, 2 days, 4 days, 7 days, 2 weeks, 4 weeks, 2 months, 3 months, 4 months, 5 months, 6 months, 7 months, 8 months, 9 months, 10 months, 11 months, 1 year or more.

[0200] Administration of a pharmaceutical composition described herein can be administered in one dose, continuously or intermittently throughout the course of treatment. Methods of determining the most effective means and dosage of administration can be determined by a physician or another medical professional and can vary with the composition used for therapy, the purpose of the therapy, and the subject being treated. For example, depending on the age and size of a subject, an appropriate dosage can be calculated. Additionally, an administration can be delivered locally or systemically depending on disease location. In some cases, compositions provided herein can be delivered via a vector or without a vector, for example as a naked composition. Single or multiple administrations can be carried out with the dose level and pattern being selected by the treating physician. Suitable dosage formulations and methods of administering the agents can be known in the art. Routes of administration can also be determined and method of determining the most effective routes of administration can be determined by a physician or another medial professional and can vary with the composition used for treatment, the purpose of the treatment, the health condition or disease stage of the subject being treated, and target cell or tissue. Non-limiting examples of routes of administration include oral administration, nasal administration, injection, and topical application.

[0201] Administration can refer to methods that can be used to enable the delivery of a pharmaceutical composition described herein (e.g. a peptide) to the desired site of biological action. For example, a nucleic acid encoding for a peptide described herein can be comprised in a viral vector and can be administered by intravenous administration. Administration disclosed herein to an area in need of treatment or therapy can be achieved by, for example, and not by way of limitation, oral administration, topical administration, intravenous administration, inhalation administration, or any combination thereof. In some embodiments, delivery can include injection, catheterization, gastrostomy tube administration, intraosseous administration, ocular administration, otic administration, transdermal administration, oral administration, rectal administration, nasal administration, intravaginal administration, intracavernous administration, transurethral administration, sublingual administration, or a combination thereof. Delivery can include direct application to the affected tissue or region of the body. In some cases, topical administration can comprise administering a lotion, a solution, an emulsion, a cream, a balm, an oil, a paste, a stick, an aerosol, a foam, a jelly, a foam, a mask, a pad, a powder, a solid, a tincture, a butter, a patch, a gel, a spray, a drip, a liquid formulation, an ointment to an external surface of a surface, such as a skin. Delivery can include a parenchymal injection, an intra-thecal injection, an intra-ventricular injection, or an intra-cisternal injection. A composition provided herein can be administered by any method. A method of administration can be by intraarterial injection, intracisternal injection, intramuscular injection, intraparenchymal injection, intraperitoneal injection, intraspinal injection, intrathecal injection, intravenous injection, intraventricular injection, stereotactic injection, subcutaneous injection, epidural, or any combination thereof. Delivery can include parenteral administration (including intravenous, subcutaneous, intrathecal, intraperitoneal, intramuscular, intravascular or infusion administration). In some cases, delivery can be from a device. In some instances, delivery can be administered by a pump, an infusion pump, or a combination thereof. In some embodiments, delivery can be by an enema, an eye drop, a nasal spray, or any combination thereof. In some instances, a subject can administer the composition in the absence of supervision. In some instances, a subject can administer the composition under the supervision of a medical professional (e.g., a physician, nurse, physician's assistant, orderly, hospice worker, etc.). In some embodiments, a medical professional can administer the composition.

[0202] In some cases, administering can be oral ingestion. In some cases, delivery can be a capsule or a tablet. Oral ingestion delivery can comprise a tea, an elixir, a food, a drink, a beverage, a syrup, a liquid, a gel, a capsule, a tablet, an oil, a tincture, or any combination thereof. In some embodiments, a food can be a medical food. In some instances, a capsule can comprise hydroxymethylcellulose. In some embodiments, a capsule can comprise a gelatin, hydroxypropylmethyl cellulose, pullulan, or any combination thereof. In some cases, capsules can comprise a coating, for example, an enteric coating. In some embodiments, a capsule can comprise a vegetarian product or a vegan product such as a hypromellose capsule. In some embodiments, delivery can comprise inhalation by an inhaler, a diffuser, a nebulizer, a vaporizer, or a combination thereof.

[0203] The following examples are intended to illustrate but not limit the disclosure. While they are typical of those that might be used, other procedures known to those skilled in the art may alternatively be used.

### EXAMPLES

[0204] Design of Gene Fragment Libraries. Gene fragments from target genes were composed of the DNA coding sequence for all 40 mer amino acids from the genes listed in FIG. 1B, 6 and 7. The 5′ and 3′ ends of each gene fragment were modified to contain a start and stop codon, as well as ˜20 bp of DNA homologous to the expression plasmid for downstream Gibson cloning. For cell surface expression constructs start and stop codons were excluded.

[0205] Gene Fragment Cloning. Gene fragment libraries were synthesized as pooled single stranded oligonucleotides by Custom Array. These oligonucleotides were then PCR amplified using KAPA-HiFi (Kapa Biosystems) to generate double stranded gene fragments compatible with Gibson cloning. 50 μl PCR reactions were set up with 25 ng of pooled oligonucleotide template and 2.5 μl of primers PEP_1 and PEP_2 (10 μM). The thermal cycler was programmed to run at 95C for 30 seconds, followed by 12 cycles of 98C for 15 seconds, 65C for 15 seconds, and 72C for 45 seconds. This was followed by a final 5-minute extension at 72C. PCR products were then purified using the QlAquick PCR purification kit. See Table 4 for primer sequences.

[0206] The gene fragment overexpression vector pEPIP was generated from a modified pEGIP (Addgene #26777). The vector was modified to remove the GFP insert, insert an EcoRI cloning site, and add primer binding regions with which to amplify the libraries for HTS. To clone the gene fragment libraries into the appropriate expression vector, pEPIP was first digested with EcoRI (NEB) for 3 hours at 37C. The linearized vectors were then column purified using the QlAquick PCR purification kit. Subsequently, Gibson assembly was used to clone the gene fragment libraries into the pEPIP vector. For each reaction, 10 μl of Gibson Reaction MasterMix (NEB) was combined with 100 ng of the vector and 50 ng of the double stranded gene fragment library, with H20 up to 20 μl . The Gibson reactions were then incubated at 50C for 1 hr and transformed via electroporation into 200 μl of ElectroMAX Stb14 competent cells (Invitrogen) according to the manufacturer's protocol. The Stb14 cells were then resuspended in 4 mL of SOC media and placed at 37C with shaking for 1 hr to recover. After recovering, 1 μl of the SOC/cell suspension was spread on LB-carbenicillin plates to calculate library coverage, with the remaining SOC/cells used to inoculate a 100 ml culture of LB-carbenicillin. Greater than 2000 fold library coverage was obtained to ensure all gene fragments were well represented. After 16 hours of incubation at 37C with shaking, plasmid DNA was isolated via a Qiagen Plasmid Plus Maxi Kit.

TABLE 4
Primers:

| Name | Description | Sequence |
|---|---|---|
| PEP_01 | Used to amplify | GGCTAGGTAAGCTTGATATCG |
| | initial oligo | GCCACCATG (SEQ ID |
| | pool and | NO: 9512) |
| | individually | |
| | synthesized cancer | |
| | driver gene | |
| | fragments for | |
| | cloning | |
| PEP_02 | Used to amplify | GGCGGCACTGTTTAACAAGCC |
| | initial oligo pool | CGTCAGTAG |
| | and individually | (SEQ ID NO: 9513) |
| | synthesized cancer | |
| | driver gene | |
| | fragments for | |
| | cloning | |
| PEP_03 | Used to amplify | ACACTCTTTCCCTACACGACG |
| | cancer driver gene | CTCTTCCGATCTGCTTGATAT |
| | fragments for high | CGGCCACCATG |
| | throughput | (SEQ ID NO: 9514) |
| | sequencing | |
| PEP_04 | Used to amplify | GACTGGAGTTCAGACGTGTGC |
| | cancer driver gene | TCTTCCGATCTCACTGTTTAA |
| | fragments for high | CAAGCCCGTCAGTAG |
| | throughput | (SEQ ID NO: 9515) |
| | sequencing | |
| PEP_05 | Used to amplify | TGACGGTTCTGGGAGCGGTTC |
| | Betacoronavirus | T(SEQ ID NO: 9516) |
| | receptor | |
| | oligo pools | |
| | and individually | |
| | synthesized gene | |
| | fragments for | |
| | cloning | |
| PEP_06 | Used to amplify | GTTCGCTGCCGGACCCACTTC |
| | Betacoronavirus | C |
| | receptor oligo pools | (SEQ ID NO: 9517) |
| | and individually | |
| | synthesized gene | |
| | fragments for | |
| | cloning | |
| PEP_07 | Used to amplify | ACACTCTTTCCCTACACGACG |
| | Betacoronavirus | CTCTTCCGATCTTGACGGTTC |
| | receptor gene | TGGGAGCGGTTCT (SEQ ID |
| | fragments for high | NO: 9518) |
| | throughput | |
| | sequencing | |
| PEP_08 | Used to amplify | GACTGGAGTTCAGACGTGTGC |
| | Betacoronavirus | TCTTCCGATCTGTTCGCTGCC |
| | receptor gene | GGACCCACTTCC |
| | fragments for high | (SEQ ID NO: 9519) |
| | throughput | |
| | sequencing | |
| EF1a_seq | Used for Sanger | TTCTCAAGCCTCAGACAGTGG |
| | sequencing of | (SEQ ID NO: 9520) |
| | constructs cloned | |
| | into peptide | |
| | expression vectors | |

[0207] Lentivirus Production. Replication deficient lentiviral particles were produced in HEK293FT cells (Invitrogen) via transient transfection. HEK293FT cells were grown in DMEM media (Gibco) supplemented with 10%FBS (Gibco). The day before transfection, HEK293FT cells were seeded in a 15 cm dish at ˜40% confluency. The day of transfection, the culture media was changed to fresh DMEM plus 10% FBS. At the same time, 3 ml of Optimem reduced serum media (Life Technologies) was mixed with 36 μl of lipofectamine 2000, 3 μg of pMD2.G plasmid (Addgene #12259), 12 μg of pCMV deltaR8.2 plasmid (Addgene #12263), and 9 μg of the gene fragment plasmid library. After 30 minutes of incubation, the plasmid/lipofectamine mixture was added dropwise to theHEK293FT cells. Supernatant containing viral particles was harvested 48 and 72 hours after transfection and concentrated to 1 ml using Amicon Ultra-15 centrifugal filters with a cutoff 100,000 NMWL (Millipore). The viral particles were then aliquoted and frozen at −80C until further use.

[0208] Fitness Screening in Mammalian Cell Lines. Hs578T cells and MDA-MB-231 cells were cultured in DMEM media supplemented with 10% FBS. Cells were transduced with the gene fragment library at an MOI <0.3 to ensure each cell received a single construct. Viral transduction was performed in media containing 8 μg/ml polybrene to improve transduction efficiency. For each cell line, screening was conducted with two biological replicates. 48 hours after transduction, the cell culture media was changed to DMEM containing puromycin to select for transduced cells. 2 μg/ml puromycin was used to select the Hs578T cells, and 3.5 μg/ml puromycin was used to select the MDA-MB-231 cells. For both cell lines, more than 6,000,000 cells were transduced to ensure greater than 1000-fold coverage of the library. The cells were cultured for 14 days after transduction, with genomic DNA isolated via a Qiagen DNeasy Blood and Tissue Kit at days 3 and 14.

[0209] HTS Library Preparation and Sequencing. Gene fragments for each time point and replicate were then amplified from the genomic DNA using Kapa HiFi. The fragments serve as their own barcodes for downstream abundance calculations. Illumina compatible libraries were prepared using 2.5 μl of primers PEP_3 and PEP_4 (10 μM) per 50 μl reaction. For each sample 10 separate 50 μl PCR reactions with 4 μg of gDNA each (40 μg total) were performed to ensure adequate library coverage. Thermal cycling parameters were identical to those used to amplify the gene fragment oligos, with the exception that the gDNA required 26 cycles to amplify. NEBNext Multiplexed Oligos for Illumina (NEB) were used to index the samples, and 150 bp single end reads were then generated via an Illumina HiSeq2500. Greater than 500-fold sequencing depth was used to ensure accurate abundance quantitation. For the larger libraries, the number of PCR reactions was scaled to process 300 μg of total gDNA per timepoint and replicate. The larger libraries were then sequenced with 100 bp paired end reads generated via an Illumina HiSeq4000.

[0210] Processing of sequencing files. To quantify gene fragment relative abundance, the library definition text file (containing gene fragment names and sequences) was first converted into Fasta format. This Fasta file was then used to build a Bowtie2 index file. Raw FASTQ reads were then mapped to the library index file via Bowtie2. For the expanded libraries paired end reads were first merged into a single FASTQ file via FLASH (Fast Length Adjustment of SHort reads). Reads with insertion or deletion mutations were removed to eliminate spurious data resulting from out of frame gene fragments. The resulting SAM files were then compressed to BAM files via SAMtools. Following this, the count module in MAGeCK was used to determine the gene fragment abundances from the alignment files and indivisual peptide log fold change and depletion P-values.

[0211] Calculation of Amino Acid Level Depletion Scores. After generating the gene fragment count files, all downstream analysis was performed in R. For each amino acid residue in the overall protein structure, an amino acid level log fold change was calculated by taking the mean log2 fold change of all overlapping gene fragments for each replicate. The geometric mean of the biological replicates was then used for downstream analysis. For every residue in the protein scaffolds, this mean log2 fold change (x) was then converted to a z-score (z), normalizing to the library wide amino acid log2 fold change standard deviation (δ) and mean (μ)

$$Fitness Score = Z = \frac{x - μ}{σ}$$

[0212] To identify amino acid positions which were significantly depleted, a one tailed permutation test was performed. The approximate permutation distribution of amino acid fitness scores was generated by randomly shuffling the labels of all gene fragments in the screen. This shuffled data was subsequently used to recalculate the amino acid fitness scores. This resampling procedure was then repeated N=10,000 times, with the P values for each amino acid position calculated by the following:

$$P = \frac{{\sum }_{i = 1}^{N} ( Fitnes {s}_{P e r m} < F i t n e s {s}_{O b s} )}{N permutations}$$

[0213] These P values were then adjusted for multiple comparison testing by the Benjamini-Hochberg procedure. The R packages “ggplot2”, “dplyr”, and “zoo” were used to generate figures. An analogous procedure was used to identify enriched domains (and corresponding enrichment scores) when screening coronavirus receptor peptides for binding to the spike protein/RBD.

[0214] Validating Highly Depleted Gene Fragments. All cell lines used were cultured in DMEM media supplemented with 10% FBS. The fitness impact of highly depleted gene fragments was tested in an arrayed format via a WST-8 (Dojindo) cell growth assay. Highly depleted gene fragments were synthesized by Twist Biosciences, cloned directly into the pEPIP vector, and subsequently packaged into lentiviral particles. Cells were transduced at an MOI of 4 and switched to puromycin containing media after 48 hours. Following 24 hours of puromycin selection 1,500 cells were seeded per well as biological replicates in a 96 well plate. All experimental groups for Hs578T cells had n=4. For MDA-MB-231 cells, all experimental groups had n=4, with the exception of the GFP control which had n=8. For HEK293T and MCF-7 cells all experimental groups had n=8. 2 μg/ml puromycin was used to select Hs578T and MCF-7 cells, while 3.5 μg/ml puromycin was used to select MDA-MB-231 and HEK293T cells. For the second panel of experiments (DICER1-552, etc.) all experimental groups had n=6. Cell growth was then quantified via absorbance at 450 nm following 1.5 hrs of incubation with WST-8 reagent. A two-tailed P value was then calculated via an unpaired ttest with Welch's correction.

[0215] Engineering Peptides for Exogenous Delivery. Peptides shown in FIG. 3B were fused to an N-terminal cell penetrating motif via a (GS)3 linker sequence (Table 5) and chemically synthesized by GenScript's Custom Peptide Synthesis service at crude purity. For dose response experiments, cells were plated in 96 well plates (n=4) at 50% confluency and peptides were added at the indicated concentrations with cell viability quantified after 24hrs via the WST-8 assay. Cell viability was normalized to that of an untreated control on the same plate.

TABLE 5

| Name | Amino Acid Sequence |
|---|---|
| TAT-EGFR- | GRKKRRQRRRPPQGSGSGSMEA |
| 697 | PNQALLRILKETEFKKIKVLGS |
| | GAFGTVYKGLWIPEGE |
| | (SEQ ID NO: 9521) |
| TAT-RAF1-73 | GRKKRRQRRRPPQGSGSGSMRN |
| | GMSLHDCLMKALKVRGLQPECC |
| | AVFRLLHEHKGKKARL |
| | (SEQ ID NO: 9522) |
| TAT-RAF1-78 | GRKKRRQRRRPPQGSGSGSMLH |
| | DCLMKALKVRGLQPECCAVFRL |
| | LHEHKGKKARLDWNTD |
| | (SEQ ID NO: 9701) |
| TAT-FLAG | GRKKRRQRRRPPQGSGSGSDYK |
| | DHDGDYKDHDIDYKDDDDK |
| | (SEQ ID NO: 9522) |

[0216] Co-Immunoprecipitation. HEK293T cells were seeded in 6 well plates to be 75% confluent on the day of transfection. Transfections were performed with 1 μg of each indicated plasmid per well with 5 μl of Lipofectamine 2000 according to the manufacturers protocol. 48 hours after transfection, cells were washed twice with ice cold PBS and lysed for 30 minutes in ice cold 400 μl TBS buffer containing 0.5% Triton x-100, 1 mM EDTA, and Halt Protease Inhibitor Cocktail (Thermo Fisher 78429). The supernatant was then clarified by centrifugation at 14,000 G for 15 minutes. Following this, immunoprecipitation of FLAG tagged constructs was performed by adding 300 μl of the lysate to 20 μl of packed anti FLAG agarose beads (Millipore Sigma A2220) prewashed with TBS. The remaining 100 μl of lysate was stored at −80C for later analysis. The bead-lysate mixture was then mixed end over end at 4C for 2 hours. After binding to the beads, the bead-protein complexes were washed three times with 1 ml lysis buffer and eluted with 20 μl of 2× SDS-PAGE Laemmli loading buffer (BioRad 1610737).

[0217] Western Blotting. Proteins were first separated on 4-20% polyacrylamide gels (BioRad 4561094) under denaturing conditions in Tris-Glycine-SDS (BioRad 1610732) for 1 hour at 100V. Following this, proteins were transferred to 0.2 μm nitrocellulose membranes (BioRad 1620112) for 30 minutes at 100V in Tris-Glycine buffer (BioRad 1610734) containing 30% methanol. Membranes were then blocked for 1 hour in TBS-T (Cell Signaling 9997) containing 5% non-fat dry milk (BioRad 1706404XTU). Primary antibodies were then added (diluted 1:1000 in TBS-T+ 5% milk) and incubated overnight at 4C with gentle agitation. The following day the membranes were washed three times in TBS-T and incubated for 1 hour with HRP conjugated secondary antibodies (diluted 1:10,000 in TBS-T) at room temp. The membranes were then washed again three times with TBS-T and developed using SuperSignal West Pico Plus Chemiluminescent Substrate (Thermo Fisher 34577).

[0218] Immunofluorescence. Cells were plated the day before transduction at approximately 20% confluency. On the day of transduction, cells were transduced with the appropriate lentiviral constructs at an MOI of 1 and allowed to grow for 72 hours. Following this, the cells were washed twice with PBS and fixed for 30 minutes at room temperature with 4% paraformaldehyde. Cells were then washed three times with PBS and blocked for 1 hour at room temp with TBS plus 5% Sea Block (Thermo Fisher PI37527X3) and 0.2% Triton x-100. The blocking buffer was then aspirated and replaced with blocking buffer plus anti-FLAG primary antibody at a 1:500 dilution. The primary antibody was then allowed to bind overnight at 4C. The following day, the cells were washed three times with PBS, and incubated for 1 hour with a secondary anti-mouse IgG antibody conjugated to DyLight 488 (diluted 1:200). The cells were then washed three times with PBS and subsequently imaged via fluorescence microscopy.

[0219] RNA-Seq of Highly Depleted Fragments. RNA sequencing was performed on Hs578T cells 6 days after transduction with lentivirus expressing gene fragments of interest. Two biological replicates were sequenced for each experimental condition. Total RNA was isolated from cells via an RNEasy Kit (Qiagen) with on column DNAse I treatment. An NEBNext Poly(A) mRNA Magnetic Isolation Module (E7490S) was then used to deplete rRNA. Subsequently, an NEBNext Ultra RNA Library Prep Kit (E7530S) was used to generate Illumina compatible RNA sequencing libraries. Sequencing was performed on an Illumina HiSeq4000, with paired end 100 bp reads. Reads were aligned to the human reference transcriptome via the STAR aligner, and differential gene expression was performed using DESeq2. Differential expression was tested in reference to a control group transduced with lentivirus coding for GFP. Following this, the R package “fgsea” was used to conduct GSEA pre-ranked analysis. Genes were ranked via the shrunken log fold change values outputted by DESeq2.

[0220] Network Visualization. Network of protein-protein interactions was generated using publicly available data from STRING. Edges were drawn for all interactions with a confidence score greater than 0.98, taking into account all interaction sources available. Node color was based on fitness scores for each gene available via DepMap CRISPR knockout screening. The CERES normalized gene effects were used to quantify the fitness impact of a given knockout. Visualization was then performed in CytoScape.

[0221] Self-Surface Peptide Cloning. The cell surface peptide expression vector (pEsPIP) was generated from a modified pEGIP (Addgene #26777). The vector was modified to remove the GFP insert, and insert a cloning site flanked by an in-frame Ig Kappa leader sequence and PDGFR transmembrane domain to ensure proper localization of peptides. Cell surface peptide libraries were amplified with PEP_5 and PEP_6 and cloned via Gibson Assembly into pEsPIP as described above.

[0222] Screening for Betacoronavirus Binders using Magnetic Cell Isolation. Preparation of lentivirus and transduction of NIH-3T3 cells was performed as above, with care taken to ensure 1,000 fold library coverage during transduction. 48 hours after transduction, cells were selected with 3 μg/ml of puromycin. 72 hours after transduction, cells were incubated for 30 minutes on ice with 25 μg/mL of the appropriate mouse Fc tagged Betacoronavirus protein (Sino Biological 40592-V05H and 40591-V05H1) and subsequently washed once with PBS to remove free protein. Cells were then incubated with anti-mouse Fc magnetic beads for 15 minutes (Miltenyi 130-048-401), washed again with PBS and subjected to magnetic activated cell sorting according to the manufacturers protocol. The bound fraction was subsequently washed thrice and then eluted. Genomic DNA was then extracted and sequencing libraries generated as above (using primers PEP_7/8).

[0223] Recombinant Peptide Production. Recombinant production protocol was adapted from (Tropea et al., 2009). Recombinant MBP fusions and TEV protease were cloned into the pET Champion vector (Thermo K630203) and expressed in T7 express E. coli (NEB C2566I). Constructs were ordered as gBlocks from IDT and cloned directly into the vector via Gibson Assembly. To produce high yield MBP-peptide fusions and TEV protease, a 10 mL starter culture of E. coli was grown for 14 hours at 37C in TB media. This starter culture was then used to induce a 1L culture of TB media. This culture was grown at 37C until an OD of 0.8, and then induced with 0.5 mM IPTG. The cells were subsequently grown overnight at 25C, following which the cells were pelleted and stored at −20C. To isolate recombinant proteins, cells were first lysed via mechanical disruption with mortar and pestle in liquid nitrogen and resuspended in binding buffer (50 mL 50 mM sodium phosphate, 200 mM NaCl, 10% glycerol, and 25 mM imidazole at pH 8.0). Cell lysate was then clarified via centrifugation for 30 minutes at 20,000 g. Following this, the soluble fraction of the lysate was applied via gravity flow to 5 mL of a pre-equilibrated Ni-NTA resin (Thermo 88221). The resin was subsequently washed with 15 column volumes of binding buffer, and eluted with 50 mM sodium phosphate, 200 mM NaCl, 10% glycerol and 250 mM imidazole at pH 8.0. Purified TEV protease and the MBP-peptide fusions were subsequently dialyzed into cleavage buffer (50 mM sodium phosphate, 200 mM NaCl, pH 7.4) using Amicon 3 kD MWCO centrifugal spin filters (Millipore UFC800324). Cleavage reactions were set up in cleavage buffer containing 2 mg/mL MBP-peptide fusion, 0.2 mg/mL TEV protease, and 1 mM DTT (added fresh). This reaction was allowed to proceed overnight at 25C. The following day, the cleavage reaction was diluted 1:8 with binding buffer and applied over a pre-equilibrated Ni-NTA resin to remove the TEV protease and MBP proteins (1 mL resin per 5 mg fusion protein). The flow through (containing purified peptide) was subsequently dialyzed into PBS and concentrated to 5 mg/mL.

[0224] Engineering Peptides for Exogenous Delivery. Peptides shown in FIG. 2D were fused to an N-terminal cell penetrating motif via a (GS)3 linker sequence and chemically synthesized by GenScript's Custom Peptide Synthesis service at crude purity. For dose response experiments, cells were plated in 96 well plates (n=4) at 50% confluency and peptides were added at the indicated concentrations with cell viability quantified after 24hrs via the WST-8 assay. Cell viability was normalized to that of an untreated control on the same plate.

[0225] Using the screening methods described herein a pilot peptide library was generated. Lentiviral libraries of synthetic gene fragments comprehensively tiling intracellular (cancer driver genes) and extracellular (receptors of Betacoronaviruses) proteins that serve as drivers of pathological processes was developed. Towards the former, a pilot peptide library of oncogenes and associated effectors from the RAS and MYC signaling pathways were synthesized (FIG. 1A-B). RAS and MYC are two of the most frequently mutated/amplified oncogenes across a wide variety of malignancies, highlighting the medical need to identify functional inhibitors. Compounding this, RAS and MYC have proven challenging to drug via small molecules, due to their lack of a binding pocket and reliance on PPIs for signal transduction. Owing to their larger size and ability to form complex folded structures, it was surmised peptide biologics are likely suited to disrupting the protein-protein interactions through which RAS and MYC mediate cellular proliferation.

[0226] For every target protein in the library, gene fragments were synthesized via oligonucleotide pools coding for every possible overlapping 40 mer peptide within the proteins primary structure. Testing every overlapping 40 mer improves statistical power and allows for sensitive discrimination of similar peptide motifs, minimizing the required downstream optimization of inhibitors. To maximize the chance of identifying a peptide inhibitor of RAS or MYC signaling, gene fragments derived from the downstream RAS effectors ARAF, BRAF, and RAF1, were included as well as the negative regulator of MYC stability FBXW7. FBXW7 was of interest due to its role in regulating the degradation of several other key oncogenes. In addition to gene fragments derived from the wild-type RAS and MYC proteins, fragments derived from pathogenic Ras variants that have been shown to have unique protein-protein interaction networks were also included. Furthermore, gene fragments derived from EGFR (due to its role in oncogenic signal transduction to Ras proteins), from the HRAS S17N dominant negative, and the MYC dominant negative Omomyc were also included. As negative controls fragments derived from the green fluorescent protein (GFP) and hypoxanthine(-guanine) phosphoribosyltransferase (HPRT1) were used. Finally, two canonical tumor suppressor genes TP53 and CDKN2A were used. After removing duplicates, the final library consisted of 6234 unique gene fragments, spanning 14 full length genes. The pooled library of gene fragments was then synthesized as single stranded oligonucleotides and cloned into a lentiviral vector, with an EF1a promoter driving gene fragment transcription (FIG. 1A, 3A). An internal ribosomal entry site (IRES) was placed after the gene fragment stop codon to allow for co-translation of a puromycin acetyltransferase gene. This allowed for selection of transduced cells via the addition of puromycin to the cell culture media.

[0227] The library was then packaged into lentiviral particles which were used to transduce Hs578T and MDA-MB-231 cells in duplicate (FIG. 1A). Genomic DNA was isolated three days after transduction, as well as 14 days after transduction to calculate fragment specific log2 fold changes. These gene fragment specific log2 fold change values were then used to calculate an amino acid level fitness score via the mean of all fragments which overlap a particular codon (FIG. 1A-B, 3B). This score serves as a metric with which to reduce noise between closely related peptides, as well as a way to map the results back to the original protein structure. Based on this, 2.9% (Hs578T) and 10.5% (MDA-MB-231) of residues tested had significantly depleted overlapping peptides, indicating peptides derived from these positions were collectively more deleterious to cell fitness than a random sampling of peptides from the library (FIG. 3B). There was good correlation between biological replicates, with the Hs578T and MDA-MB-231 amino acid scores having a Pearson correlation of 0.54 and 0.75, respectively.

[0228] In order to visualize protein motifs with a significant impact of cell fitness, the amino acid scores were superimposed along the primary amino acid sequence for each associated protein (FIG. 1B). EGFR, BRAF, FBXW7 and RAF1 all had significant regions of significant depletion in one of the cell lines tested, corresponding to previously annotated protein function. Peptides derived from the P-loop and Alpha C-Helix of EGFR were depleted across both cell lines, likely due to the role of the P-loop in ATP binding, as well as the conformationally sensitive role the auto-inhibitory C-Helix plays in regulating EGFR enzymatic activity. Supporting a functional role for this depleted EGFR domain, this region of the EGFR gene (Exon 19) is frequently deleted in cancer, comprising approximately 44% of activating EGFR mutations seen clinically. The Ras Binding Domain (RBD) of RAF1 was also significantly depleted across both cell lines, presumably due to the blocking of Ras-Raf interactions by titrating out the binding site on endogenous RAF1 proteins. FBXW7 had a broad region of depletion corresponding to WD repeats 1-6. Knock-out screening via CRISPR-Cas9 has shown FBXW7 is not essential in Hs578T or MDA-MB-231 cells, meaning it is unlikely that this depletion is due to direct inhibition of FBXW731. The WD repeats in FBXW7 mediate substrate binding and subsequent recruitment to the E3 ubiquitin-protein ligase complex, suggesting the highly depleted peptides may retain the ability of the full length protein to bind oncogenes such as MYC38. BRAF had several significantly depleted regions dispersed across the primary sequence including one corresponding to a previously identified phospho-degron motif centered on amino acids 394-405.

[0229] Towards the broader goal of identifying highly specific inhibitors of KRAS function, peptides derived from pathogenic variants were tested to see if they could function as more effective dominant negative proteins (FIG. 1C). Interestingly, the 40 mer peptides derived from KRAS Q61K (see, e.g., SEQ ID NO:9602 and fragments SEQ ID NOs:4161-4168 as well as SEQ ID NOs:962-1052, 2704-2721, 3186-3198, 6708-6805) were significantly depleted across both cell lines, while wild type peptides overlapping amino acid showed no effect on cell fitness. The full length Q61K mutant is highly transforming due to a modified Ras/Raf interaction. This may play a role in the anti-proliferative activity of the Q61K derived fragments (e.g., SEQ ID NOs:4161-4168). Furthermore, peptides derived from the known HRAS S17N dominant negative mutant showed selective depletion only in the mutant HRAS driven Hs578T cell line, highlighting the ability of this technology to discriminate fitness dependencies with high specificity.

[0230] In order to mine potentially translatable dominant negative peptide motifs in a more systematic fashion a library of 43,441 peptides was synthesized (FIG. 2A SEQ ID NOs:1-9459) derived from key oncogenic driver genes with a high prevalence in TCGA sequencing data. This library covers ˜20% of all high confidence cancer drivers identified in a recent computational approach, allowing for a more comprehensive characterization of potential oncogene derived dominant negative inhibitors of proliferation. This expanded screen identified many peptides with fitness defects (as measured by log fold depletion) an order of magnitude greater than those identified in the smaller pilot screen (FIG. 2A).

[0231] Peptides were also mapped from the library back to the WT protein's primary structure to visualize domains with a significant impact on cell fitness (FIG. 2C). First, the pattern of depletion for the transcription factor NFE2L2, the protein containing the most deleterious domains as scored by this screen, was examined. Peptides derived from the DNA binding domain, as well as the KEAP1 binding domain of NFE2L2 were highly depleted in the screen, consistent with the critical role these regions play in mediating NFE2L2 function. NFE2L2 has been previously shown to support cellular proliferation and metastasis in MDA-MB-231 cells, supporting the conclusion that a peptide inhibitor of NFE2L2 could be used to inhibit cell growth. The fitness of peptides derived from MDM2 were also examined. MDM2 is a negative regulator of TP53 function in the cell, and inhibition of the MDM2-TP53 PPI has been shown to effectively oppose cancer growth across a variety of malignancies. In the screening data, peptides derived from the TP53 binding domain of MDM2 were significantly depleted consistent with previous reports that truncated MDM2 proteins containing only the N-terminus function as dominant negatives. The PI3K-AKT-mTOR pathway is one of the most frequently dysregulated pathways in cancer, and PIK3CA plays a pivotal role in signal transduction along this pathway. The most critical region impacting cell fitness in PIK3CA corresponds to the adaptor binding domain of the protein. PIK3CA activity is modulated by the binding of various adaptor proteins encoded by genes such as PIK3R1, PIK3R2 and PIK3R3. Supporting the hypothesis that these peptides potentially inhibit proliferation via disruption of the PIK3CA/PIK3R1-3 complex, the corresponding PIK3CA binding domain in PIK3R1 is also depleted. The depleted domains for DICER1 were also plotted. Regions corresponding to binding sites for known DICER1 cofactors TARBP and PRKRA were heavily depleted, comprising some of the most deleterious peptides in the screen. This data supports the growing understanding of the oncogenic role miRNAs and other epigenetic regulators play in tumorigenesis. Surprisingly, the tumor suppressor RB1 contained domains which were highly deleterious to cell fitness. The N-terminal RbN domains were both highly depleted, potentially due to previously described allosteric interactions with the cell cycle regulatory transcription factor E2F49. ERBB4 had a pattern of depletion similar to EGFR, with overexpression of peptides derived from the ERBB4 regulatory P-loop and Alpha C-helix resulting in a significant fitness defect, highlighting the importance of this region in ERBB dimerization and proliferative signaling. Peptides from this screen were analyzed for their impact on cancer driver specific signaling networks (FIG. 2D) using publicly available PPI data from STRING, with nodes colored by gene fitness data sourced from DepMap CRISPR knockout screening. Notably, using this data, peptide motifs were identified that interfere with important PPI interfaces mediating signal transduction between cancer drivers previously identified as essential for cell fitness.

[0232] Building on this screen of cancer drivers, a library of peptides derived from high confidence cancer driver mutations identified via The Cancer Genome Atlas sequencing data, was also generated. This screen interrogated 579 mutant residues across 53 cancer driver genes, via 22,724 peptide coding gene fragments (FIG. 2B, E-F, 6E-G). In most cases mutant peptides had a similar effect on cell fitness compared to their wildtype counterparts. However, some mutants such as PIK3CA956F, the aforementioned KRAS61K, and BRAF594N showed markedly more deleterious effects on cell fitness (FIG. 2E, 6G). To further validate that the peptide over-expression platform can identify biophysical features relevant to the protein from which they were derived, the mutant TP53 peptide data was compared with existing TP53 deep mutational scan (DMS) data (FIG. 2F). After first filtering the DMS data for only TP53 mutants with a high magnitude of effect on cell fitness (absolute fitness value >0.5), the fitness of the corresponding mutant peptides was compared to the screen data as described herein. Even with the highly dissimilar screening modalities, significant correlation (Pearson r=0.279; P=0.045) between the predicted mutant TP53 functionality from the DMS data to the mutant TP53 peptide fitness. This indicates TP53 mutants expected to be functional (either through gain of oncogenic function or retention of WT function), generate mutant peptides with functionality consistent with the parental structure from which they were derived. Together, these results highlight a major utility of this approach, e.g., the ability to interrogate user defined peptide sequences as opposed to those present only in WT protein structures.

[0233] A similar library of dominant negative peptides was generated against ACE2 as a target to prevent SARs-Cov2 infection (see, SEQ ID NOs: 9460-9489).

[0234] Validation of the anti-proliferative effects of the peptides were tested via a complementary technology other than sequencing. Specifically, after transduction with putative anti-proliferative gene fragments derived from WT proteins, Hs578T cells and MDA-MB-231 cells were seeded in 96 well plates (n=4-8) and grown for 7 days, with proliferation measured via the colorimetric WST-8 assay (FIG. 3A, 7C-D, and Table 6). All peptides tested had significant growth defects in both cell lines compared to infection with the GFP control plasmid. EGFR-697 specifically was deleterious to cell growth in both cell lines. Three peptides derived from the KRAS Q61K mutant protein (KRAS61K-3, KRAS61K-7, and KRAS61K-13) were similarly tested, all of which significantly reduced cell growth in both cell lines (FIG. 4A-B). To test the specificity of these perturbations, MCF-7 cells were transduced with EGFR-697 and RAF1-73. MCF-7 cells show a reduced fitness defect upon overexpression of EGFR-697, consistent with previous reports showing MCF-7 cells are less sensitive than Hs578T and MDA-MB-231 cells to the EGFR inhibitor Gefitinib. As well, HEK293T cells transduced with EGFR-697 and RAF1-73 showed no growth defects, further indicating this screening methodology identifies context dependent inhibitors of cellular proliferation rather than generally toxic peptide motifs.

TABLE 6
Peptides/Proteins validated via lentiviral
overexpression

| Gene Name | Amino Acid Sequence |
|---|---|
| BRAF-379 | MIDDLIRDQGFRGDGGSTTGL |
| | SATPPASLPGSLTNVKALQK |
| | (SEQ ID NO: 9524) |
| BRAF-380 | MDDLIRDQGFRGDGGSTTGLS |
| | ATPPASLPGSLTNVKALQKS |
| | (SEQ ID NO: 9525) |
| EGFR-697 | MEAPNQALLRILKETEFKKIK |
| | VLGSGAFGTVYKGLWIPEGE |
| | (SEQ ID NO: 9526) |
| EGFR-704 | MLRILKETEFKKIKVLGSGAF |
| | GTVYKGLWIPEGEKVKIPVA |
| | (SEQ ID NO: 9527) |
| FBXW7-461 | MTSTVRCMHLHEKRVVSGSRD |
| | ATLRVWDIETGQCLHVLMGH |
| | (SEQ ID NO: 9528) |
| FBXW7-512 | MRRVVSGAYDFMVKVWDPETE |
| | TCLHTLQGHTNRVYSLQFDG |
| | (SEQ ID NO: 9529) |
| RAF1-73 | MRNGMSLHDCLMKALKVRGLQ |
| | PECCAVFRLLHEHKGKKARL |
| | (SEQ ID NO: 9530) |
| RAF1-78 | MLHDCLMKALKVRGLQPECCA |
| | VFRLLHEHKGKKARLDWNTD |
| | (SEQ ID NO: 9531) |
| KRAS61K-3 | MIQNHFVDEYDPTIEDSYRKQ |
| | VVIDGETCLLDILDTAGKEE |
| | (SEQ ID NO: 9532) |
| KRAS61K-7 | MFVDEYDPTIEDSYRKQVVID |
| | GETCLLDILDTAGKEEYSAM |
| | (SEQ ID NO: 9533) |
| KRAS61K-13 | MPTIEDSYRKQVVIDGETCLL |
| | DILDTAGKEEYSAMRDQYMR |
| | (SEQ ID NO: 9534) |
| DICER1-552 | MRARAPISNYIMLADTDKIKS |
| | FEEDLKTYKAIEKILRNKCS |
| | (SEQ ID NO: 9535) |
| KRAS-143 | METSAKTRQGVDDAFYTLVRE |
| | IRKHKEKMSKDGKKKKKKSK |
| | (SEQ ID NO: 9536) |
| MDM2-25 | METLVRPKPLLLKLLKSVGAQ |
| | KDTYTMKEVLFYLGQYIMTK |
| | (SEQ ID NO: 9537) |
| RASA1-468 | MKDAFYKNIVKKGYLLKKGKG |
| | KRWKNLYFILEGSDAQLIYF |
| | (SEQ ID NO: 9538) |

[0235] RNA-sequencing on Hs578T cells genetically engineered to overexpress the most deleterious gene fragment identified, EGFR-697, were sequenced. 225 genes were differentially expressed (BH adjusted P-value <0.05), and gene set enrichment analysis (GSEA) was performed to identify upregulation and downregulation of genetic pathways. 239 KEGG pathways corresponding to cell signaling and metabolism were tested, with 22 pathways showing significant (False Discovery Rate <0.025) enrichment/depletion in cells expressing EGFR-697 compared to control cells transduced with GFP. Several metabolic pathways relating to oxidative phosphorylation and carbon metabolism were downregulated, consistent with the role of oncogenic EGFR signaling as a driver of metabolic alterations. Furthermore, genes relating to DNA replication were also downregulated, consistent with the observed slow growing phenotype.

[0236] After validating the inhibitory activity of these peptide constructs when overexpressed genetically, experiments were performed to see if the peptides could be exogenously delivered as anti-cancer therapeutics. Towards this, EGFR-697 as well as RAF1-73 peptides were chemically synthesized, and their ability to inhibit cell growth measured when conjugated to the TAT cell penetrating protein transduction domain. (FIG. 4C, Table 6). The best performing peptide from the genetic validations, EGFR-697, maintained its anti-proliferative effects when delivered exogenously (FIG. 2D). The IC50s of the peptide (33.3 μM for Hs578T and 63 μM for MDA-MB-231) were comparable to other FDA approved EGFR inhibitors in these cell lines, highlighting the translational potential of this methodology. Moreover, RAF1-73 was also deleterious to cell growth, with IC₅₀ values of 27.0 μM and 32.6 μM for Hs578T and MDA-MB-231 respectively.

[0237] Experiments were performed to validate the hypothesis that the functionality of these putative inhibitory peptides was dependent on the role and structure of the WT protein domain they were derived from. First, 3×FLAG tagged versions of the RAF1-73 and EGFR-697 peptides were generated to verify these constructs had robust expression when overexpressed via lentivirus in Hs578T and MDA-MB-231 cells (FIG. 7E). These peptides showed detectable expression 72 hours after transduction, indicating the EF1αpromoter can drive robust expression of small peptides. After validating that these constructs were well expressed, experiments were performed to determine whether the peptides derived from protein domains retained domain specific biological activities. Specifically, experiments were performed to determine whether the RAF1-73 peptide (derived from the RAF1 Ras binding domain) retained the ability of the full-length domain to bind activated Ras proteins. To evaluate this potential interaction, HEK293T cells were co-transfected with the constitutively active KRAS G12V mutant and 3×FLAG-RAF1-73, then performed a co-immunoprecipitation using anti-FLAG agarose beads (FIG. 3C). Western blot analysis of the immunoprecipitated protein complexes subsequently verified the protein-protein interaction between RAF1-73 and Ras. In order to better understand mechanistically how the EGFR-697 peptide functions, RNA-sequencing was conducted on Hs578T cells modified via lentivirus to overexpress EGFR-697. 225 differentially expressed genes (BH adjusted P-value <0.05) were identified. Gene set enrichment analysis (GSEA) was performed to identify upregulation and downregulation of genetic pathways. 239 KEGG pathways corresponding to cell signaling and metabolism were tested, with 22 pathways showing highly significant (False Discovery Rate <0.025) upregulation/downregulation in cells expressing EGFR-697 compared to control cells transduced with GFP (FIG. 3D). Several metabolic pathways relating to oxidative phosphorylation and carbon metabolism were downregulated, consistent with the role of oncogenic EGFR signaling as a driver of metabolic alterations. Furthermore, genes relating to DNA replication were also downregulated, consistent with the observed slow growing phenotype. In addition to performing GSEA on KEGG pathways, a set of curated genes from the Molecular Signatures Database comprised of genes significantly downregulated/upregulated in H1975 cells upon treatment with an irreversible EGFR inhibitor were also tested. EGFR-697 transduction in Hs578T cells resulted in downregulation of genes identified as downregulated in response to chemical EGFR inhibition, and upregulation of genes identified as upregulated (FDR=0.008 and FDR=0.058 respectively). Collectively, this supports the hypothesis the EGFR-697 peptide can perturb EGFR signaling.

[0238] Having demonstrated the applicability of this screening format for intracellular targets, experiments targeted extracellular proteins. Specifically, tiling and assaying gene fragments on the mammalian cell surface could help map receptor ligand interfaces in their native settings and define minimal functional domains, thus complementing in vitro and phage display based strategies. Experiments screening gene fragments of receptors of Betacoronaviruses were performed. This was motivated by 2 aspects: 1) The recent emergence of the SARS-coronavirus 2 (SARS-CoV-2) and its rapid spread that is posing a major global health emergency, and; 2) The ongoing challenges with engineering a therapeutic, including ones anticipated to have the most potency such as vaccines and neutralizing antibodies. It was conjectured that since the virus is an evolving entity but the cognate receptor in humans is relatively constant, a peptide sponge derived from the spike-protein receptor interface (mapped via PepTile screening) could be a putative viral inhibitory agent. Additionally: 1) it could be broadly active against multiple strains; 2) be non-immunogenic as it is human protein derived; 3) will not retain activity of the full-length native protein and thus not disrupt normal physiology if injected into the circulation; and 4) be couplable to protein domains with naturally long serum half-life such as Fc, transferrin or albumin to improve persistence and thereby therapeutic efficacy. Notably, a recent elegant study showed soluble full length ACE2 is able to inhibit SARS-CoV-2 infection, highlighting the potential of human protein scaffolds as a strategy for therapeutic intervention.

[0239] A library of peptides derived from known receptors (and their homologs) of Betacoronaviruses was generated. This screen interrogated 15 proteins, via 11,277 peptide coding gene fragments (FIG. 8B). To express peptides on the cell surface, these were fused to an immunoglobulin K-chain leader sequence at their N terminus and a platelet-derived growth factor (PDGF) transmembrane domain at their C terminus (FIG. 4A-B, 8A). NIH/3T3 cells were used for the screens based on their non-human origin and non-transducability by SARS-CoV-2-Spike protein pseudotyped lentiviruses. Specifically, cells were transduced with the cell-surface peptide library and probed with the SARS-CoV-2 spike protein and RBD domain (bearing a mouse-Fc tag). Cells interacting with the SARS-CoV-2 proteins were separated from the pool using anti-mouse IgG magnetic beads, and their expressed peptides identified via next generation sequencing of the integrated library elements. Binding peptides were identified by comparing the relative abundance of each peptide construct in the bound fraction of cells to the abundance in the starting pool of transduced cells. Several peptides derived from the known SARS-CoV-2 receptor ACE2 were highly enriched across multiple biological replicates, including across two independent SARS-CoV-2 Spike/RBD protein samples (FIG. 4C-D). In addition to peptides derived from known binding proteins such as ACE2 and TMPRSS2, several proteins such as FAP, DPP4, and DPP8 also contained highly significant hits, highlighting putative novel interacting partners of the viral spike protein. Interestingly, the scavenger receptor cysteine rich domain of TMPRSS2 contained a region of peptides which was significantly enriched after selection for spike/RBD binders, illuminating a potential domain implicated in TMPRSS2 substrate recognition.

[0240] A streamlined peptide purification protocol was developed to facilitate rapid engineering and testing of peptide constructs for translation to medical applications. Specifically, by fusing peptides of interest to a high expressing Maltose Binding Protein (MBP) construct, peptides could be produced in a modular fashion at high yields. By incubating the peptide fusions with TEV protease to cleave the MBP, homogenous preparations of peptide constructs could be produced after subsequent immobilized metal affinity chromatography (IMAC) to remove the free MBP and TEV70. This method was validated by the production of milligram scale quantities of TAT conjugated 3×FLAG peptide, outperforming the costs associated with commercial peptide synthesis (FIG. 4E). Because this method requires no expensive equipment or specialized reagents, it is easily adaptable to labs of any scale, as well as automated medium throughput screening approaches. As peptide constructs will likely require additional engineering to maximize efficacy towards intracellular targets in vivo, this production protocol serves as both a complement to the presented PepTile screening method, as well as a general resource to accelerate the engineering of peptide therapeutics.

[0241] Cell Proliferation Assay. The Tat-RAF1-73, Tat-RAF1-78, Tat-EGFR-697 and Tat-Flag peptides were tested for growth inhibition in an in vitro cell proliferation assay. The assay tested the peptides against ten tumor cell lines and four non-tumor cell lines (Primary Fibroblasts, CCD 841 CoN, human umbilical vein cells and Human Hepatocytes). Cells were plated in a 384 well plate and allowed to grow for 24 hrs. Peptides were then added to cultures at a final concentration range of 100 μM-0.2 μM. Cells and peptides were then reacted for 72 hrs, after which the CellTiter-Glo Luminescent Cell Viability Assay kit (Promega) was used to assess cytotoxicity of therapeutic peptides. IC50 values were determined by the percent cell growth of the untreated (vehicle) control calculated from the luminescence signals compared to test wells. The surviving fraction of cells is determined by dividing the mean luminescence values of the test agents by the mean luminescence values of the untreated control. The inhibitory concentration value, IC50, for the test agents and control was estimated using Prism 8 software (GraphPad Software, Inc.) by curve- fitting the data using the non-linear regression analysis.

[0242] The results of the cell proliferation assay can be seen in Table 8. Ten cancer cell lines were screened as well as three non-cancer cell types (e.g. primary fibroblasts, CCD 841 CoN, and human hepatocytes). Activity of peptides was identified throughout the cell types including the cancer and non-cancer cell lines. Tat-Raf1-73 and Tat-Raf1-78 had more robust killing, with IC₅₀ values ranging from 1.66 μM to 48.87 μM, with Tat-EGFR-697 having more moderate IC50s that ranged from 5 μM to >100 μM (no effect). There was no activity observed in the control Tat-Flag tagged peptides in any of the cells screened.

TABLE 8

| | | Mean | Mean | Mean | Mean |
|---|---|---|---|---|---|
| | | IC₅₀ | IC₅₀ | IC₅₀ | IC₅₀ |
| | | (μM) | (μM) | (μM) | (μM) |
| | | Tat- | Tat- | Tat- | Tat- |
| Cell Line | Tissue Type | RAF1-73 | RAF1-78 | EGFR-697 | Flag |
| H929 | Human | 1.67 | 2.6 | 5.1 | >100 |
| | Multiple | | | | |
| | Myeloma | | | | |
| SNU398 | RAF1 mRNA | 7.91 | 11.06 | 29.23 | >100 |
| | (Log2) 6.07 | | | | |
| Jurkat | RAF1 mRNA | 7.4 | 9.24 | 41.06 | >100 |
| | (Log2) 6.05 | | | | |
| HUH6-luc | RAF1 mRNA | 21.31 | 25.32 | 73.48 | >100 |
| | (Log2) 6.05 | | | | |
| Colo205 | Human Colon | 6.12 | 7.28 | 19.81 | >100 |
| A549 | RAF1 mRNA | 13.09 | 15.74 | 59.65 | >100 |
| | (Log2) | | | | |
| | Negative | | | | |
| MDA-MB- | EGFR mRNA | 15.5 | 16.13 | 56.62 | >100 |
| 231 | (Log2) 4.78 | | | | |
| HT1376 | EGFR mRNA | 25.09 | 26.99 | 95.60* | >100 |
| | (Log2) 5. | | | | |
| FaDu | EGFR mRNA | 20.62 | 26.67 | 89.21 | >100 |
| | (Log2) 6.28 | | | | |
| SK-MEL-5 | EGFR mRNA | 4.98 | 5.98 | 27.56 | >100 |
| | (Log2) 5.92 | | | | |
| Primary | Skin | 1.77 | 2.97 | 15.07 | >100 |
| Fibroblasts | Fibroblast | | | | |
| CCD 841 | Normal Human | 40.14 | 48.87 | >100 | >100 |
| CoN | Colon | | | | |
| Human | Human | 4.56 | 6.77 | 11.56 | >100 |
| Hepatocytes | Hepatocytes | | | | |
| Human | Normal | 4.24 | 4.84 | 14.04 | >100 |
| umbilical | endothelial | | | | |
| vein | | | | | |
| endothelial | | | | | |
| cells | | | | | |
| (HUVEC) | | | | | |

*Value was averaged using >100 μM value for one trial result

[0243] It will be understood that various modifications may be made without departing from the spirit and scope of this disclosure. Accordingly, other embodiments are within the scope of the following claims.

The application's sequence listing, which the Patent Office published only in electronic form, follows.

SEQUENCE LISTING (9701 sequences)

SEQ ID NO: 1 - protein, 40 aa, Artificial Sequence
  Description of Artificial Sequence: Synthetic polypeptide
IVKEGWLHKRGKYIKTWRPRYFLLKNDGTFIGYKERPQDV

SEQ ID NO: 2 - protein, 40 aa, Artificial Sequence
  Description of Artificial Sequence: Synthetic polypeptide
GWLHKRGKYIKTWRPRYFLLKNDGTFIGYKERPQDVDQRE

SEQ ID NO: 3 - protein, 40 aa, Artificial Sequence
  Description of Artificial Sequence: Synthetic polypeptide
KRGEYIKTWRPRYFLLKNDGTFIGYKERPQDVDQREAPRN

SEQ ID NO: 4 - protein, 40 aa, Artificial Sequence
  Description of Artificial Sequence: Synthetic polypeptide
RGEYIKTWRPRYFLLKNDGTFIGYKERPQDVDQREAPRNN

SEQ ID NO: 5 - protein, 40 aa, Artificial Sequence
  Description of Artificial Sequence: Synthetic polypeptide
PRNNFSVAQCQLMKTERPRPNTFIIRCLQWTTVIERTFHV

SEQ ID NO: 6 - protein, 40 aa, Artificial Sequence
  Description of Artificial Sequence: Synthetic polypeptide
GQITVGQRIVSGSFGTVYKGKWHGDVAVKMLNVTAPTPQQ

SEQ ID NO: 7 - protein, 40 aa, Artificial Sequence
  Description of Artificial Sequence: Synthetic polypeptide
QITVGQRIVSGSFGTVYKGKWHGDVAVKMLNVTAPTPQQL

SEQ ID NO: 8 - protein, 40 aa, Artificial Sequence
  Description of Artificial Sequence: Synthetic polypeptide
QRIGSESFGTVYKGKWHGDVAVKMLNVTAPTPQQLQAFKN

SEQ ID NO: 9 - protein, 40 aa, Artificial Sequence
  Description of Artificial Sequence: Synthetic polypeptide
TVGQRIGSGSCGTVYKGKWHGDVAVKMLNVTAPTPQQLQA

SEQ ID NO: 10 - protein, 40 aa, Artificial Sequence
  Description of Artificial Sequence: Synthetic polypeptide
AKSIIHRDLKSNNIFLHEDLTVKIGGFGLATVKSRWSGSH

SEQ ID NO: 11 - protein, 40 aa, Artificial Sequence
  Description of Artificial Sequence: Synthetic polypeptide
KSIIHRDLKSNNIFLHEDLTVKIGGFGLATVKSRWSGSHQ

SEQ ID NO: 12 - protein, 40 aa, Artificial Sequence
  Description of Artificial Sequence: Synthetic polypeptide
LHAKSIIHRDLKSNNIFLHEDLTVKIGNFGLATVKSRWSG

SEQ ID NO: 13 - protein, 40 aa, Artificial Sequence
  Description of Artificial Sequence: Synthetic polypeptide
HAKSIIHRDLKSNNIFLHEDLTVKIGNFGLATVKSRWSGS

SEQ ID NO: 14 - protein, 40 aa, Artificial Sequence
  Description of Artificial Sequence: Synthetic polypeptide
AKSIIHRDLKSNNIFLHEDLTVKIGNFGLATVKSRWSGSH

SEQ ID NO: 15 - protein, 40 aa, Artificial Sequence
  Description of Artificial Sequence: Synthetic polypeptide
KSIIHRDLKSNNIFLHEDLTVKIGNFGLATVKSRWSGSHQ

SEQ ID NO: 16 - protein, 40 aa, Artificial Sequence
  Description of Artificial Sequence: Synthetic polypeptide
SGGPQALVNIMRTYTFEKLLWTTSRVLKVLSVCSSNKPAI

SEQ ID NO: 17 - protein, 40 aa, Artificial Sequence
  Description of Artificial Sequence: Synthetic polypeptide
AYGNQESKLIILASGGPQALVNIMRTYTYKKLLWTTSRVL

SEQ ID NO: 18 - protein, 40 aa, Artificial Sequence
  Description of Artificial Sequence: Synthetic polypeptide
GNQESKLIILASGGPQALVNIMRTYTYKKLLWTTSRVLKV

SEQ ID NO: 19 - protein, 40 aa, Artificial Sequence
  Description of Artificial Sequence: Synthetic polypeptide
ESKLIILASGGPQALVNIMRTYTYKKLLWTTSRVLKVLSV

SEQ ID NO: 20 - protein, 40 aa, Artificial Sequence
  Description of Artificial Sequence: Synthetic polypeptide
ILASGGPQALVNIMRTYTYKKLLWTTSRVLKVLSVCSSNK

SEQ ID NO: 21 - protein, 40 aa, Artificial Sequence
  Description of Artificial Sequence: Synthetic polypeptide
SGGPQALVNIMRTYTYKKLLWTTSRVLKVLSVCSSNKPAI

SEQ ID NO: 22 - protein, 40 aa, Artificial Sequence
  Description of Artificial Sequence: Synthetic polypeptide
GGPQALVNIMRTYTYKKLLWTTSRVLKVLSVCSSNKPAIV

SEQ ID NO: 23 - protein, 40 aa, Artificial Sequence
  Description of Artificial Sequence: Synthetic polypeptide
PQALVNIMRTYTYKKLLWTTSRVLKVLSVCSSNKPAIVEA

SEQ ID NO: 24 - protein, 40 aa, Artificial Sequence
  Description of Artificial Sequence: Synthetic polypeptide
QALVNIMRTYTYKKLLWTTSRVLKVLSVCSSNKPAIVEAG

SEQ ID NO: 25 - protein, 40 aa, Artificial Sequence
  Description of Artificial Sequence: Synthetic polypeptide
ALVNIMRTYTYKKLLWTTSRVLKVLSVCSSNKPAIVEAGG

SEQ ID NO: 26 - protein, 40 aa, Artificial Sequence
  Description of Artificial Sequence: Synthetic polypeptide
LVNIMRTYTYKKLLWTTSRVLKVLSVCSSNKPAIVEAGGM

SEQ ID NO: 27 - protein, 40 aa, Artificial Sequence
  Description of Artificial Sequence: Synthetic polypeptide
VNIMRTYTYKKLLWTTSRVLKVLSVCSSNKPAIVEAGGMQ

SEQ ID NO: 28 - protein, 40 aa, Artificial Sequence
  Description of Artificial Sequence: Synthetic polypeptide
FENFEKKINYRFKNKAYLLQAFTHASYHYNTITDCYQRLK

SEQ ID NO: 29 - protein, 40 aa, Artificial Sequence
  Description of Artificial Sequence: Synthetic polypeptide
ENFEKKINYRFKNKAYLLQAFTHASYHYNTITDCYQRLKF

SEQ ID NO: 30 - protein, 40 aa, Artificial Sequence
  Description of Artificial Sequence: Synthetic polypeptide
NFEKKINYRFKNKAYLLQAFTHASYHYNTITDCYQRLKFL

SEQ ID NO: 31 - protein, 40 aa, Artificial Sequence
  Description of Artificial Sequence: Synthetic polypeptide
EKKINYRFKNKAYLLQAFTHASYHYNTITDCYQRLKFLGD

SEQ ID NO: 32 - protein, 40 aa, Artificial Sequence
  Description of Artificial Sequence: Synthetic polypeptide
EKKINYRFKNKAYLLQAFTHASYHYNTITDCYQRLEFLGN

SEQ ID NO: 33 - protein, 40 aa, Artificial Sequence
  Description of Artificial Sequence: Synthetic polypeptide
QALLRILKETEFKKIKVLCSGAFGTVYKGLWIPEGEKVKI

SEQ ID NO: 34 - protein, 40 aa, Artificial Sequence
  Description of Artificial Sequence: Synthetic polypeptide
RILKETEFKKIKVLCSGAFGTVYKGLWIPEGEKVKIPVAI

SEQ ID NO: 35 - protein, 40 aa, Artificial Sequence
  Description of Artificial Sequence: Synthetic polypeptide
FKKIKVLCSGAFGTVYKGLWIPEGEKVKIPVAIKELREAT

SEQ ID NO: 36 - protein, 40 aa, Artificial Sequence
  Description of Artificial Sequence: Synthetic polypeptide
KKIKVLCSGAFGTVYKGLWIPEGEKVKIPVAIKELREATS

SEQ ID NO: 37 - protein, 40 aa, Artificial Sequence
  Description of Artificial Sequence: Synthetic polypeptide
NQALLRILKETEFKKIKVLDSGAFGTVYKGLWIPEGEKVK

SEQ ID NO: 38 - protein, 40 aa, Artificial Sequence
  Description of Artificial Sequence: Synthetic polypeptide
QALLRILKETEFKKIKVLDSGAFGTVYKGLWIPEGEKVKI

SEQ ID NO: 39 - protein, 40 aa, Artificial Sequence
  Description of Artificial Sequence: Synthetic polypeptide
RILKETEFKKIKVLDSGAFGTVYKGLWIPEGEKVKIPVAI

SEQ ID NO: 40 - protein, 40 aa, Artificial Sequence
  Description of Artificial Sequence: Synthetic polypeptide
APNQALLRILKETEFKKIKVLGSGAFSTVYKGLWIPEGEK

SEQ ID NO: 41 - protein, 40 aa, Artificial Sequence
  Description of Artificial Sequence: Synthetic polypeptide
PNQALLRILKETEFKKIKVLGSGAFSTVYKGLWIPEGEKV

SEQ ID NO: 42 - protein, 40 aa, Artificial Sequence
  Description of Artificial Sequence: Synthetic polypeptide
NQALLRILKETEFKKIKVLGSGAFSTVYKGLWIPEGEKVK

SEQ ID NO: 43 - protein, 40 aa, Artificial Sequence
  Description of Artificial Sequence: Synthetic polypeptide
QALLRILKETEFKKIKVLGSGAFSTVYKGLWIPEGEKVKI

SEQ ID NO: 44 - protein, 40 aa, Artificial Sequence
  Description of Artificial Sequence: Synthetic polypeptide
LLRILKETEFKKIKVLGSGAFSTVYKGLWIPEGEKVKIPV

SEQ ID NO: 45 - protein, 40 aa, Artificial Sequence
  Description of Artificial Sequence: Synthetic polypeptide
ILKETEFKKIKVLGSGAFSTVYKGLWIPEGEKVKIPVAIK

SEQ ID NO: 46 - protein, 40 aa, Artificial Sequence
  Description of Artificial Sequence: Synthetic polypeptide
LKETEFKKIKVLGSGAFSTVYKGLWIPEGEKVKIPVAIKE

SEQ ID NO: 47 - protein, 40 aa, Artificial Sequence
  Description of Artificial Sequence: Synthetic polypeptide
KETEFKKIKVLGSGAFSTVYKGLWIPEGEKVKIPVAIKEL

SEQ ID NO: 48 - protein, 40 aa, Artificial Sequence
  Description of Artificial Sequence: Synthetic polypeptide
ETEFKKIKVLGSGAFSTVYKGLWIPEGEKVKIPVAIKELR

SEQ ID NO: 49 - protein, 40 aa, Artificial Sequence
  Description of Artificial Sequence: Synthetic polypeptide
KVLGSGAFSTVYKGLWIPEGEKVKIPVAIKELREATSPKA

SEQ ID NO: 50 - protein, 40 aa, Artificial Sequence
  Description of Artificial Sequence: Synthetic polypeptide
PPNQRRVYISYPDSVHFFRPKCLRTAVYHEILIGYLEYVK

SEQ ID NO: 51 - protein, 40 aa, Artificial Sequence
  Description of Artificial Sequence: Synthetic polypeptide
PNQRRVYISYPDSVHFFRPKCLRTAVYHEILIGYLEYVKK

SEQ ID NO: 52 - protein, 40 aa, Artificial Sequence
  Description of Artificial Sequence: Synthetic polypeptide
NQRRVYISYPDSVHFFRPKCLRTAVYHEILIGYLEYVKKL

SEQ ID NO: 53 - protein, 40 aa, Artificial Sequence
  Description of Artificial Sequence: Synthetic polypeptide
RVYISYPDSVHFFRPKCLRTAVYHEILIGYLEYVKKLGYT

SEQ ID NO: 54 - protein, 40 aa, Artificial Sequence
  Description of Artificial Sequence: Synthetic polypeptide
PPPNQRRVYISYLNSVHFFRPKCLRTAVYHEILIGYLEYV

SEQ ID NO: 55 - protein, 40 aa, Artificial Sequence
  Description of Artificial Sequence: Synthetic polypeptide
PPNQRRVYISYLNSVHFFRPKCLRTAVYHEILIGYLEYVK

SEQ ID NO: 56 - protein, 40 aa, Artificial Sequence
  Description of Artificial Sequence: Synthetic polypeptide
YLNSVHFFRPKCLRTAVYHEILIGYLEYVKKLGYTTGHIW

SEQ ID NO: 57 - protein, 40 aa, Artificial Sequence
  Description of Artificial Sequence: Synthetic polypeptide
RVYISYLDIVHFFRPKCLRTAVYHEILIGYLEYVKKLGYT

SEQ ID NO: 58 - protein, 40 aa, Artificial Sequence
  Description of Artificial Sequence: Synthetic polypeptide
RRVYISYLDSVHFFRPKCLRTAVDHEILIGYLEYVKKLGY

SEQ ID NO: 59 - protein, 40 aa, Artificial Sequence
  Description of Artificial Sequence: Synthetic polypeptide
PPPDQKIPKPKRLQEWYKKMLDKAVSERIVHDYKDIFKQA

SEQ ID NO: 60 - protein, 40 aa, Artificial Sequence
  Description of Artificial Sequence: Synthetic polypeptide
ETELRKVKVLGSGAFGTVYKGIWIPDGENVKIPVAIKVSR

SEQ ID NO: 61 - protein, 40 aa, Artificial Sequence
  Description of Artificial Sequence: Synthetic polypeptide
ARRINDEIERQLRRDKRDARRELKLLLLGTVESGKSTFIK

SEQ ID NO: 62 - protein, 40 aa, Artificial Sequence
  Description of Artificial Sequence: Synthetic polypeptide
IERQLRRDKRDARRELKLLLLGTVESGKSTFIKQMRIIHG

SEQ ID NO: 63 - protein, 40 aa, Artificial Sequence
  Description of Artificial Sequence: Synthetic polypeptide
QLRRDKRDARRELKLLLLGTVESGKSTFIKQMRIIHGSGY

SEQ ID NO: 64 - protein, 40 aa, Artificial Sequence
  Description of Artificial Sequence: Synthetic polypeptide
MQTLLSLVRQYNPKMVKVASLLVKRTPRSVGYKPDFVGFE

SEQ ID NO: 65 - protein, 40 aa, Artificial Sequence
  Description of Artificial Sequence: Synthetic polypeptide
QTLLSLVRQYNPKMVKVASLLVKRTPRSVGYKPDFVGFEI

SEQ ID NO: 66 - protein, 40 aa, Artificial Sequence
  Description of Artificial Sequence: Synthetic polypeptide
KSPNETIRNILGGTVFREPIICKNIPRLVPGWTKPITIGR

SEQ ID NO: 67 - protein, 40 aa, Artificial Sequence
  Description of Artificial Sequence: Synthetic polypeptide
VEEFKLKKMWKSPNGTIQNILGGTVFREPIICKNIPRLVP

SEQ ID NO: 68 - protein, 40 aa, Artificial Sequence
  Description of Artificial Sequence: Synthetic polypeptide
NILGGTVFREPIICKNIPRLVPGWTKPITIGGHAHGDQYK

SEQ ID NO: 69 - protein, 40 aa, Artificial Sequence
  Description of Artificial Sequence: Synthetic polypeptide
SPNGTIRNILGGTVFREPIICKNIPRLVPGWTKPITIGSH

SEQ ID NO: 70 - protein, 40 aa, Artificial Sequence
  Description of Artificial Sequence: Synthetic polypeptide
MAFLASKNCIHRDLAARNILLTHGRITKICDFVLARDIKN

SEQ ID NO: 71 - protein, 40 aa, Artificial Sequence
  Description of Artificial Sequence: Synthetic polypeptide
RNILLTHGRITKICDFVLARDIKNDSNYVVKGNARLPVKW

SEQ ID NO: 72 - protein, 40 aa, Artificial Sequence
  Description of Artificial Sequence: Synthetic polypeptide
CIHRDLAARNILLTHGRITKICDFGLARVIKNDSNYVVKG

SEQ ID NO: 73 - protein, 40 aa, Artificial Sequence
  Description of Artificial Sequence: Synthetic polypeptide
HGRITKICDFGLARVIKNDSNYVVKGNARLPVKWMAPESI

SEQ ID NO: 74 - protein, 40 aa, Artificial Sequence
  Description of Artificial Sequence: Synthetic polypeptide
HKPSGLVMARKLIHLEIKPAIRNQIIRELQVLHECNSLYI

SEQ ID NO: 75 - protein, 40 aa, Artificial Sequence
  Description of Artificial Sequence: Synthetic polypeptide
GLARDMYDKEYYSVHNKTGAKLHVKWMALESLQTQKFTTK

SEQ ID NO: 76 - protein, 40 aa, Artificial Sequence
  Description of Artificial Sequence: Synthetic polypeptide
LIHQLLTDIGRYHPQALIYPLRVASKSTTTARHNAANKIL

SEQ ID NO: 77 - protein, 40 aa, Artificial Sequence
  Description of Artificial Sequence: Synthetic polypeptide
IQRYAVIPVSTNSGLIGWVPHCDTLHALIRDYREKKKILL

SEQ ID NO: 78 - protein, 40 aa, Artificial Sequence
  Description of Artificial Sequence: Synthetic polypeptide
PSYSRRISTATPYMNGETSTKSLWVINSALRIKILCATYG

SEQ ID NO: 79 - protein, 40 aa, Artificial Sequence
  Description of Artificial Sequence: Synthetic polypeptide
SRRISTATPYMNGETSTKSLWVINSALRIKILCATYGNVN

SEQ ID NO: 80 - protein, 40 aa, Artificial Sequence
  Description of Artificial Sequence: Synthetic polypeptide
STKSLWVINSALRIKILCATYGNVNIRDIDKIYVRTGIYH

SEQ ID NO: 81 - protein, 40 aa, Artificial Sequence
  Description of Artificial Sequence: Synthetic polypeptide
SYSRRISTATPYMNGETSTKSLWVINSALRIKILCATYMN

SEQ ID NO: 82 - protein, 40 aa, Artificial Sequence
  Description of Artificial Sequence: Synthetic polypeptide
SRRISTATPYMNGETSTKSLWVINSALRIKILCATYMNVN

SEQ ID NO: 83 - protein, 40 aa, Artificial Sequence
  Description of Artificial Sequence: Synthetic polypeptide
RISTATPYMNGETSTKSLWVINSALRIKILCATYMNVNIR

SEQ ID NO: 84 - protein, 40 aa, Artificial Sequence
  Description of Artificial Sequence: Synthetic polypeptide
TSTKSLWVINSALRIKILCATYMNVNIRDIDKIYVRTGIY

SEQ ID NO: 85 - protein, 40 aa, Artificial Sequence
  Description of Artificial Sequence: Synthetic polypeptide
STKSLWVINSALRIKILCATYMNVNIRDIDKIYVRTGIYH

SEQ ID NO: 86 - protein, 40 aa, Artificial Sequence
  Description of Artificial Sequence: Synthetic polypeptide
TKSLWVINSALRIKILCATYMNVNIRDIDKIYVRTGIYHG

SEQ ID NO: 87 - protein, 40 aa, Artificial Sequence
  Description of Artificial Sequence: Synthetic polypeptide
YSRRISTATPYMNGETSTKSLWVINSALRIKILCATYVIV

SEQ ID NO: 88 - protein, 40 aa, Artificial Sequence
  Description of Artificial Sequence: Synthetic polypeptide
SRRISTATPYMNGETSTKSLWVINSALRIKILCATYVIVN

SEQ ID NO: 89 - protein, 40 aa, Artificial Sequence
  Description of Artificial Sequence: Synthetic polypeptide
RRISTATPYMNGETSTKSLWVINSALRIKILCATYVIVNI

SEQ ID NO: 90 - protein, 40 aa, Artificial Sequence
  Description of Artificial Sequence: Synthetic polypeptide
TSTKSLWVINSALRIKILCATYVIVNIRDIDKIYVRTGIY

SEQ ID NO: 91 - protein, 40 aa, Artificial Sequence
  Description of Artificial Sequence: Synthetic polypeptide
STKSLWVINSALRIKILCATYVIVNIRDIDKIYVRTGIYH

SEQ ID NO: 92 - protein, 40 aa, Artificial Sequence
  Description of Artificial Sequence: Synthetic polypeptide
YSRRISTATPYMNGETSTKSLWVINSALRIKILCATYVYV

SEQ ID NO: 93 - protein, 40 aa, Artificial Sequence
  Description of Artificial Sequence: Synthetic polypeptide
SRRISTATPYMNGETSTKSLWVINSALRIKILCATYVYVN

SEQ ID NO: 94 - protein, 40 aa, Artificial Sequence
  Description of Artificial Sequence: Synthetic polypeptide
RRISTATPYMNGETSTKSLWVINSALRIKILCATYVYVNI

SEQ ID NO: 95 - protein, 40 aa, Artificial Sequence
  Description of Artificial Sequence: Synthetic polypeptide
RISTATPYMNGETSTKSLWVINSALRIKILCATYVYVNIR

SEQ ID NO: 96 - protein, 40 aa, Artificial Sequence
  Description of Artificial Sequence: Synthetic polypeptide
TSTKSLWVINSALRIKILCATYVYVNIRDIDKIYVRTGIY

SEQ ID NO: 97 - protein, 40 aa, Artificial Sequence
  Description of Artificial Sequence: Synthetic polypeptide
STKSLWVINSALRIKILCATYVYVNIRDIDKIYVRTGIYH

SEQ ID NO: 98 - protein, 40 aa, Artificial Sequence
  Description of Artificial Sequence: Synthetic polypeptide
WVINSALRIKILCATYVNVNIRDIDKIYVRTGIYHGGVPL

SEQ ID NO: 99 - protein, 40 aa, Artificial Sequence
  Description of Artificial Sequence: Synthetic polypeptide
GQLFHIDFGHFLDHKKKKFGYKRERVPFVFTQDFLIVISK

SEQ ID NO: 100 - protein, 40 aa, Artificial Sequence
  Description of Artificial Sequence: Synthetic polypeptide
QLFHIDFGHFLDHKKKKFGYKRERVPFVFTQDFLIVISKG

SEQ ID NO: 101 - protein, 40 aa, Artificial Sequence
  Description of Artificial Sequence: Synthetic polypeptide
LFHIDFGHFLDHKKKKFGYKRERVPFVFTQDFLIVISKGA

SEQ ID NO: 102 - protein, 40 aa, Artificial Sequence
  Description of Artificial Sequence: Synthetic polypeptide
FHIDFGHFLDHKKKKFGYKRERVPFVFTQDFLIVISKGAQ

SEQ ID NO: 103 - protein, 40 aa, Artificial Sequence
  Description of Artificial Sequence: Synthetic polypeptide
HIDFGHFLDHKKKKFGYKRERVPFVFTQDFLIVISKGAQE

SEQ ID NO: 104 - protein, 40 aa, Artificial Sequence
  Description of Artificial Sequence: Synthetic polypeptide
IDFGHFLDHKKKKFGYKRERVPFVFTQDFLIVISKGAQEC

SEQ ID NO: 105 - protein, 40 aa, Artificial Sequence
  Description of Artificial Sequence: Synthetic polypeptide
DFGHFLDHKKKKFGYKRERVPFVFTQDFLIVISKGAQECT

SEQ ID NO: 106 - protein, 40 aa, Artificial Sequence
  Description of Artificial Sequence: Synthetic polypeptide
FGHFLDHKKKKFGYKRERVPFVFTQDFLIVISKGAQECTK

SEQ ID NO: 107 - protein, 40 aa, Artificial Sequence
  Description of Artificial Sequence: Synthetic polypeptide
GHFLDHKKKKFGYKRERVPFVFTQDFLIVISKGAQECTKT

SEQ ID NO: 108 - protein, 40 aa, Artificial Sequence
  Description of Artificial Sequence: Synthetic polypeptide
FLDHKKKKFGYKRERVPFVFTQDFLIVISKGAQECTKTRE

SEQ ID NO: 109 - protein, 40 aa, Artificial Sequence
  Description of Artificial Sequence: Synthetic polypeptide
HKKKKFGYKRERVPFVFTQDFLIVISKGAQECTKTREFER

SEQ ID NO: 110 - protein, 40 aa, Artificial Sequence
  Description of Artificial Sequence: Synthetic polypeptide
KKKKFGYKRERVPFVFTQDFLIVISKGAQECTKTREFERF

SEQ ID NO: 111 - protein, 40 aa, Artificial Sequence
  Description of Artificial Sequence: Synthetic polypeptide
KKKFGYKRERVPFVFTQDFLIVISKGAQECTKTREFERFQ

SEQ ID NO: 112 - protein, 40 aa, Artificial Sequence
  Description of Artificial Sequence: Synthetic polypeptide
EKLRDTADGTFLVRDASTKMHGDYTLTLRKWGNNKLIKIF

SEQ ID NO: 113 - protein, 40 aa, Artificial Sequence
  Description of Artificial Sequence: Synthetic polypeptide
RDTADGTFLVRDASTKMHGDYTLTLRKWGNNKLIKIFHRD

SEQ ID NO: 114 - protein, 40 aa, Artificial Sequence
  Description of Artificial Sequence: Synthetic polypeptide
TFLVRDASTKMHGDYTLTLRKWGNNKLIKIFHRDGKYGFS

SEQ ID NO: 115 - protein, 40 aa, Artificial Sequence
  Description of Artificial Sequence: Synthetic polypeptide
VRDASTKMHGDYTLTLRKWGNNKLIKIFHRDGKYGFSDPL

SEQ ID NO: 116 - protein, 40 aa, Artificial Sequence
  Description of Artificial Sequence: Synthetic polypeptide
ASTKMHGDYTLTLRKWGNNKLIKIFHRDGKYGFSDPLTFS

SEQ ID NO: 117 - protein, 40 aa, Artificial Sequence
  Description of Artificial Sequence: Synthetic polypeptide
TKMHGDYTLTLRKWGNNKLIKIFHRDGKYGFSDPLTFSSV

SEQ ID NO: 118 - protein, 40 aa, Artificial Sequence
  Description of Artificial Sequence: Synthetic polypeptide
YTLTLRKWGNNKLIKIFHRDGKYGFSDPLTFSSVVELINH

SEQ ID NO: 119 - protein, 40 aa, Artificial Sequence
  Description of Artificial Sequence: Synthetic polypeptide
TLTLRKWGNNKLIKIFHRDGKYGFSDPLTFSSVVELINHY

SEQ ID NO: 120 - protein, 40 aa, Artificial Sequence
  Description of Artificial Sequence: Synthetic polypeptide
LTLRKWGNNKLIKIFHRDGKYGFSDPLTFSSVVELINHYR

SEQ ID NO: 121 - protein, 40 aa, Artificial Sequence
  Description of Artificial Sequence: Synthetic polypeptide
TLRKWGNNKLIKIFHRDGKYGFSDPLTFSSVVELINHYRN

SEQ ID NO: 122 - protein, 40 aa, Artificial Sequence
  Description of Artificial Sequence: Synthetic polypeptide
RKWGNNKLIKIFHRDGKYGFSDPLTFSSVVELINHYRNES

SEQ ID NO: 123 - protein, 40 aa, Artificial Sequence
  Description of Artificial Sequence: Synthetic polypeptide
EKLRDTADGTFLVRDASTKMHGDYTLTLRKGRNNKLIKIF

SEQ ID NO: 124 - protein, 40 aa, Artificial Sequence
  Description of Artificial Sequence: Synthetic polypeptide
ADGTFLVRDASTKMHGDYTLTLRKGRNNKLIKIFHRDGKY

SEQ ID NO: 125 - protein, 40 aa, Artificial Sequence
  Description of Artificial Sequence: Synthetic polypeptide
DGTFLVRDASTKMHGDYTLTLRKGRNNKLIKIFHRDGKYG

SEQ ID NO: 126 - protein, 40 aa, Artificial Sequence
  Description of Artificial Sequence: Synthetic polypeptide
ASTKMHGDYTLTLRKGRNNKLIKIFHRDGKYGFSDPLTFS

SEQ ID NO: 127 - protein, 40 aa, Artificial Sequence
  Description of Artificial Sequence: Synthetic polypeptide
HGDYTLTLRKGRNNKLIKIFHRDGKYGFSDPLTFSSVVEL

SEQ ID NO: 128 - protein, 40 aa, Artificial Sequence
  Description of Artificial Sequence: Synthetic polypeptide
DYTLTLRKGRNNKLIKIFHRDGKYGFSDPLTFSSVVELIN

SEQ ID NO: 129 - protein, 40 aa, Artificial Sequence
  Description of Artificial Sequence: Synthetic polypeptide
KGRNNKLIKIFHRDGKYGFSDPLTFSSVVELINHYRNESL

SEQ ID NO: 130 - protein, 40 aa, Artificial Sequence
  Description of Artificial Sequence: Synthetic polypeptide
FLVRDASTKMHGDYTLTLRKGGNNNLIKIFHRDGKYGFSD

SEQ ID NO: 131 - protein, 40 aa, Artificial Sequence
  Description of Artificial Sequence: Synthetic polypeptide
VRDASTKMHGDYTLTLRKGGNNNLIKIFHRDGKYGFSDPL

SEQ ID NO: 132 - protein, 40 aa, Artificial Sequence
  Description of Artificial Sequence: Synthetic polypeptide
ASTKMHGDYTLTLRKGGNNNLIKIFHRDGKYGFSDPLTFS

SEQ ID NO: 133 - protein, 40 aa, Artificial Sequence
  Description of Artificial Sequence: Synthetic polypeptide
YPEIDKRMNSIKPDLIQLRKTRDQYLMWLTQKGVRQKKLN

SEQ ID NO: 134 - protein, 40 aa, Artificial Sequence
  Description of Artificial Sequence: Synthetic polypeptide
RIMHNYDKLKSRISEIIDSRRRLEEDLKKQAAEYREIGKR

SEQ ID NO: 135 - protein, 40 aa, Artificial Sequence
  Description of Artificial Sequence: Synthetic polypeptide
IMHNYDKLKSRISEIIDSRRRLEEDLKKQAAEYREIGKRM

SEQ ID NO: 136 - protein, 40 aa, Artificial Sequence
  Description of Artificial Sequence: Synthetic polypeptide
KLKSRISEIIDSRRRLEEDLKKQAAEYREIGKRMNSIKPD

SEQ ID NO: 137 - protein, 40 aa, Artificial Sequence
  Description of Artificial Sequence: Synthetic polypeptide
SEIIDSRRRLEEDLKKQAAEYREIGKRMNSIKPDLIQLRK

SEQ ID NO: 138 - protein, 40 aa, Artificial Sequence
  Description of Artificial Sequence: Synthetic polypeptide
EIIDSRRRLEEDLKKQAAEYREIGKRMNSIKPDLIQLRKT

SEQ ID NO: 139 - protein, 40 aa, Artificial Sequence
  Description of Artificial Sequence: Synthetic polypeptide
IIDSRRRLEEDLKKQAAEYREIGKRMNSIKPDLIQLRKTR

SEQ ID NO: 140 - protein, 40 aa, Artificial Sequence
  Description of Artificial Sequence: Synthetic polypeptide
QRIMHNYDKLKSRISEIIDSRRRLEEDLKKQAAEYREIYK

SEQ ID NO: 141 - protein, 40 aa, Artificial Sequence
  Description of Artificial Sequence: Synthetic polypeptide
RIMHNYDKLKSRISEIIDSRRRLEEDLKKQAAEYREIYKR

SEQ ID NO: 142 - protein, 40 aa, Artificial Sequence
  Description of Artificial Sequence: Synthetic polypeptide
IMHNYDKLKSRISEIIDSRRRLEEDLKKQAAEYREIYKRM

SEQ ID NO: 143 - protein, 40 aa, Artificial Sequence
  Description of Artificial Sequence: Synthetic polypeptide
MHNYDKLKSRISEIIDSRRRLEEDLKKQAAEYREIYKRMN

SEQ ID NO: 144 - protein, 40 aa, Artificial Sequence
  Description of Artificial Sequence: Synthetic polypeptide
NYDKLKSRISEIIDSRRRLEEDLKKQAAEYREIYKRMNSI

SEQ ID NO: 145 - protein, 40 aa, Artificial Sequence
  Description of Artificial Sequence: Synthetic polypeptide
YDKLKSRISEIIDSRRRLEEDLKKQAAEYREIYKRMNSIK

SEQ ID NO: 146 - protein, 40 aa, Artificial Sequence
  Description of Artificial Sequence: Synthetic polypeptide
SRRRLEEDLKKQAAEYREIYKRMNSIKPDLIQLRKTRDQY

SEQ ID NO: 147 - protein, 40 aa, Artificial Sequence
  Description of Artificial Sequence: Synthetic polypeptide
NYDKLKSRISEIIDSRRRLEEDLKKQAAEYREIDKRMNRI

SEQ ID NO: 148 - protein, 40 aa, Artificial Sequence
  Description of Artificial Sequence: Synthetic polypeptide
YDKLKSRISEIIDSRRRLEEDLKKQAAEYREIDKRMNRIK

SEQ ID NO: 149 - protein, 40 aa, Artificial Sequence
  Description of Artificial Sequence: Synthetic polypeptide
SRRRLEEDLKKQAAEYREIDKRMNRIKPDLIQLRKTRDQY

SEQ ID NO: 150 - protein, 40 aa, Artificial Sequence
  Description of Artificial Sequence: Synthetic polypeptide
RRRLEEDLKKQAAEYREIDKRMNRIKPDLIQLRKTRDQYL

SEQ ID NO: 151 - protein, 40 aa, Artificial Sequence
  Description of Artificial Sequence: Synthetic polypeptide
IIDSRRRLEEDLKKQAAEYREIDKRMNSIKTDLIQLRKTR

SEQ ID NO: 152 - protein, 40 aa, Artificial Sequence
  Description of Artificial Sequence: Synthetic polypeptide
SRTSACGLFSVCYPRVSSAVKAELRQYFRNLCSDDTRMVR

SEQ ID NO: 153 - protein, 40 aa, Artificial Sequence
  Description of Artificial Sequence: Synthetic polypeptide
RVSSAVKAELRQYFRNLCSDDTRMVRRAAASKLGEFAKVL

SEQ ID NO: 154 - protein, 40 aa, Artificial Sequence
  Description of Artificial Sequence: Synthetic polypeptide
TLQQQECKLLYSRKEGQRQENKNKNRCKNILPFDHTRVVL

SEQ ID NO: 155 - protein, 40 aa, Artificial Sequence
  Description of Artificial Sequence: Synthetic polypeptide
FETLQQQECKLLYSRKEGQRQENKNKNRYKNMLPFDHTRV

SEQ ID NO: 156 - protein, 40 aa, Artificial Sequence
  Description of Artificial Sequence: Synthetic polypeptide
ETLQQQECKLLYSRKEGQRQENKNKNRYKNMLPFDHTRVV

SEQ ID NO: 157 - protein, 40 aa, Artificial Sequence
  Description of Artificial Sequence: Synthetic polypeptide
TLQQQECKLLYSRKEGQRQENKNKNRYKNMLPFDHTRVVL

SEQ ID NO: 158 - protein, 40 aa, Artificial Sequence
  Description of Artificial Sequence: Synthetic polypeptide
LQQQECKLLYSRKEGQRQENKNKNRYKNMLPFDHTRVVLH

SEQ ID NO: 159 - protein, 40 aa, Artificial Sequence
  Description of Artificial Sequence: Synthetic polypeptide
QQQECKLLYSRKEGQRQENKNKNRYKNMLPFDHTRVVLHD

SEQ ID NO: 160 - protein, 40 aa, Artificial Sequence
  Description of Artificial Sequence: Synthetic polypeptide
QQECKLLYSRKEGQRQENKNKNRYKNMLPFDHTRVVLHDG

SEQ ID NO: 161 - protein, 40 aa, Artificial Sequence
  Description of Artificial Sequence: Synthetic polypeptide
QECKLLYSRKEGQRQENKNKNRYKNMLPFDHTRVVLHDGD

SEQ ID NO: 162 - protein, 40 aa, Artificial Sequence
  Description of Artificial Sequence: Synthetic polypeptide
ECKLLYSRKEGQRQENKNKNRYKNMLPFDHTRVVLHDGDP

SEQ ID NO: 163 - protein, 40 aa, Artificial Sequence
  Description of Artificial Sequence: Synthetic polypeptide
CKLLYSRKEGQRQENKNKNRYKNMLPFDHTRVVLHDGDPN

SEQ ID NO: 164 - protein, 40 aa, Artificial Sequence
  Description of Artificial Sequence: Synthetic polypeptide
KLLYSRKEGQRQENKNKNRYKNMLPFDHTRVVLHDGDPNE

SEQ ID NO: 165 - protein, 40 aa, Artificial Sequence
  Description of Artificial Sequence: Synthetic polypeptide
DVPKTIQMVRSQRSVMVQTEAQYRFIYMAVQHYIETLQRR

SEQ ID NO: 166 - protein, 40 aa, Artificial Sequence
  Description of Artificial Sequence: Synthetic polypeptide
QRSGIVQTEAQYRFIYMAVQHYIETLQRRIEEEQKSKRKG

SEQ ID NO: 167 - protein, 40 aa, Artificial Sequence
  Description of Artificial Sequence: Synthetic polypeptide
VRSQRSGMVQKEAQYRFIYMAVQHYIETLQRRIEEEQKSK

SEQ ID NO: 168 - protein, 40 aa, Artificial Sequence
  Description of Artificial Sequence: Synthetic polypeptide
RSGMVQTEAHYRFIYMAVQHYIETLQRRIEEEQKSKRKGH

SEQ ID NO: 169 - protein, 40 aa, Artificial Sequence
  Description of Artificial Sequence: Synthetic polypeptide
HYRFIYMAVQHYIETLQRRIEEEQKSKRKGHEYTNIKYSL

SEQ ID NO: 170 - protein, 40 aa, Artificial Sequence
  Description of Artificial Sequence: Synthetic polypeptide
RSQRSGMVQTEALYRFIYMAVQHYIETLQRRIEEEQKSKR

SEQ ID NO: 171 - protein, 40 aa, Artificial Sequence
  Description of Artificial Sequence: Synthetic polypeptide
LYRFIYMAVQHYIETLQRRIEEEQKSKRKGHEYTNIKYSL

SEQ ID NO: 172 - protein, 40 aa, Artificial Sequence
  Description of Artificial Sequence: Synthetic polypeptide
AKEIGAVKYLECSVLTQRGLKTVFDEAIRAVLCPPPVKKR

SEQ ID NO: 173 - protein, 40 aa, Artificial Sequence
  Description of Artificial Sequence: Synthetic polypeptide
ANRIGAFGYMECSTKTKDGVREVFEMATRAALQARRGKKK

SEQ ID NO: 174 - protein, 40 aa, Artificial Sequence
  Description of Artificial Sequence: Synthetic polypeptide
AFGYMECSTKTKDGVREVFEMATRAALQARRGKKKSGCLV

SEQ ID NO: 175 - protein, 40 aa, Artificial Sequence
  Description of Artificial Sequence: Synthetic polypeptide
AFGYMECSVKTKDGVREVFEMATRAALQARRGKKKSGCLV

SEQ ID NO: 176 - protein, 40 aa, Artificial Sequence
  Description of Artificial Sequence: Synthetic polypeptide
YCSNRQFQRKQHADVEVILTEKKGWGLRAAKDLPSNTFVL

SEQ ID NO: 177 - protein, 40 aa, Artificial Sequence
  Description of Artificial Sequence: Synthetic polypeptide
LRAAKDLPSNTFVLEYCGEVLDHKEFKARVKEYARNKNIR

SEQ ID NO: 178 - protein, 40 aa, Artificial Sequence
  Description of Artificial Sequence: Synthetic polypeptide
SNTFVLEYCGEVLDHKEFKARVKEYARNKNIRYYFMALKN

SEQ ID NO: 179 - protein, 40 aa, Artificial Sequence
  Description of Artificial Sequence: Synthetic polypeptide
HKEFKARVKEYARNKNIHYYFMALKNDEIIDATQKGNCSL

SEQ ID NO: 180 - protein, 40 aa, Artificial Sequence
  Description of Artificial Sequence: Synthetic polypeptide
DQYVRNTTARAFAVVASALGIPSLLPFLKAVCKSKKSWQA

SEQ ID NO: 181 - protein, 40 aa, Artificial Sequence
  Description of Artificial Sequence: Synthetic polypeptide
EYVRYTTARAFAVVASALGIPSLLPFLKAVCKSKKSWQAR

SEQ ID NO: 182 - protein, 40 aa, Artificial Sequence
  Description of Artificial Sequence: Synthetic polypeptide
YTTARAFAVVASALGIPSLLPFLKAVCKSKKSWQARHTGI

SEQ ID NO: 183 - protein, 40 aa, Artificial Sequence
  Description of Artificial Sequence: Synthetic polypeptide
NTTARAFAVVASALGIPSLLPFLKAVCKSKKSWQARRTGI

SEQ ID NO: 184 - protein, 40 aa, Artificial Sequence
  Description of Artificial Sequence: Synthetic polypeptide
AFAVVASALGIPSLLPFLKAVCKSKKSWQARRTGIKIVQQ

SEQ ID NO: 185 - protein, 40 aa, Artificial Sequence
  Description of Artificial Sequence: Synthetic polypeptide
ASALGIPSLLPFLKAVCKSKKSWQARRTGIKIVQQIAILM

SEQ ID NO: 186 - protein, 40 aa, Artificial Sequence
  Description of Artificial Sequence: Synthetic polypeptide
SLLPFLKAVCKSKKSWQARRTGIKIVQQIAILMGCAILPH

SEQ ID NO: 187 - protein, 40 aa, Artificial Sequence
  Description of Artificial Sequence: Synthetic polypeptide
PFLKAVCKSKKSWQARRTGIKIVQQIAILMGCAILPHLRS

SEQ ID NO: 188 - protein, 40 aa, Artificial Sequence
  Description of Artificial Sequence: Synthetic polypeptide
TARAFAVVASALGIPSLLPFLKAVCKSKKSWQARHPGIKI

SEQ ID NO: 189 - protein, 40 aa, Artificial Sequence
  Description of Artificial Sequence: Synthetic polypeptide
SLLPFLKAVCKSKKSWQARHPGIKIVQQIAILMGCAILPH

SEQ ID NO: 190 - protein, 40 aa, Artificial Sequence
  Description of Artificial Sequence: Synthetic polypeptide
PFLKAVCKSKKSWQARHPGIKIVQQIAILMGCAILPHLRS

SEQ ID NO: 191 - protein, 40 aa, Artificial Sequence
  Description of Artificial Sequence: Synthetic polypeptide
ALGIPSLLPFLKAVCKSKKSWQARHTGIEIVQQIAILMGC

SEQ ID NO: 192 - protein, 40 aa, Artificial Sequence
  Description of Artificial Sequence: Synthetic polypeptide
IPSLLPFLKAVCKSKKSWQARHTGIEIVQQIAILMGCAIL

SEQ ID NO: 193 - protein, 40 aa, Artificial Sequence
  Description of Artificial Sequence: Synthetic polypeptide
LKAVCKSKKSWQARHTGIEIVQQIAILMGCAILPHLRSLV

SEQ ID NO: 194 - protein, 40 aa, Artificial Sequence
  Description of Artificial Sequence: Synthetic polypeptide
ASALGIPSLLPFLKAVCKSKKSWQARHTGINIVQQIAILM

SEQ ID NO: 195 - protein, 40 aa, Artificial Sequence
  Description of Artificial Sequence: Synthetic polypeptide
IPSLLPFLKAVCKSKKSWQARHTGINIVQQIAILMGCAIL

SEQ ID NO: 196 - protein, 40 aa, Artificial Sequence
  Description of Artificial Sequence: Synthetic polypeptide
KSKKSWQARHTGINIVQQIAILMGCAILPHLRSLVEIIEH

SEQ ID NO: 197 - protein, 40 aa, Artificial Sequence
  Description of Artificial Sequence: Synthetic polypeptide
RAFAVVASALGIPSLLPFLKAVCKSKKSWQARHTGITIVQ

SEQ ID NO: 198 - protein, 40 aa, Artificial Sequence
  Description of Artificial Sequence: Synthetic polypeptide
ALGIPSLLPFLKAVCKSKKSWQARHTGITIVQQIAILMGC

SEQ ID NO: 199 - protein, 40 aa, Artificial Sequence
  Description of Artificial Sequence: Synthetic polypeptide
LKAVCKSKKSWQARHTGITIVQQIAILMGCAILPHLRSLV

SEQ ID NO: 200 - protein, 40 aa, Artificial Sequence
  Description of Artificial Sequence: Synthetic polypeptide
CKSKKSWQARHTGITIVQQIAILMGCAILPHLRSLVEIIE

SEQ ID NO: 201 - protein, 40 aa, Artificial Sequence
  Description of Artificial Sequence: Synthetic polypeptide
AATPYGIESFDSVLKPLWKGIRQHRGKGLAAVLKAIGYLI

SEQ ID NO: 202 - protein, 40 aa, Artificial Sequence
  Description of Artificial Sequence: Synthetic polypeptide
ATPYGIESFDSVLKPLWKGIRQHRGKGLAAVLKAIGYLIP

SEQ ID NO: 203 - protein, 40 aa, Artificial Sequence
  Description of Artificial Sequence: Synthetic polypeptide
GIESFDSVLKPLWKGIRQHRGKGLAAVLKAIGYLIPLMDA

SEQ ID NO: 204 - protein, 40 aa, Artificial Sequence
  Description of Artificial Sequence: Synthetic polypeptide
PLWKGIRQHRGKGLAAVLKAIGYLIPLMDAEYANYYTREV

SEQ ID NO: 205 - protein, 40 aa, Artificial Sequence
  Description of Artificial Sequence: Synthetic polypeptide
RRLCILRMSFVKGGGPDYPRQSIKETPCWIEIHLHRALQL

SEQ ID NO: 206 - protein, 40 aa, Artificial Sequence
  Description of Artificial Sequence: Synthetic polypeptide
RRLCILRMSFVKGWGPDYPRQSIKETPCLIEIHLHRALQL

SEQ ID NO: 207 - protein, 40 aa, Artificial Sequence
  Description of Artificial Sequence: Synthetic polypeptide
DLRRLCILRMSFVKGWGPDYPRQSIKETPCRIEIHLHRAL

SEQ ID NO: 208 - protein, 40 aa, Artificial Sequence
  Description of Artificial Sequence: Synthetic polypeptide
SLNLLLVSCPKSEVRAKFKFSILNAKGEETKAMESQRAYR

SEQ ID NO: 209 - protein, 40 aa, Artificial Sequence
  Description of Artificial Sequence: Synthetic polypeptide
LSSSVPSQKTYQCSYGFRLGFLHSGTAKSVTCTYSPALNK

SEQ ID NO: 210 - protein, 40 aa, Artificial Sequence
  Description of Artificial Sequence: Synthetic polypeptide
AAPAPAPSWPLSSSVPSQKTYQVSYGFRLGFLHSGTAKSV

SEQ ID NO: 211 - protein, 40 aa, Artificial Sequence
  Description of Artificial Sequence: Synthetic polypeptide
PAPAPSWPLSSSVPSQKTYQVSYGFRLGFLHSGTAKSVTC

SEQ ID NO: 212 - protein, 40 aa, Artificial Sequence
  Description of Artificial Sequence: Synthetic polypeptide
APAPSWPLSSSVPSQKTYQVSYGFRLGFLHSGTAKSVTCT

SEQ ID NO: 213 - protein, 40 aa, Artificial Sequence
  Description of Artificial Sequence: Synthetic polypeptide
WPLSSSVPSQKTYQVSYGFRLGFLHSGTAKSVTCTYSPAL

SEQ ID NO: 214 - protein, 40 aa, Artificial Sequence
  Description of Artificial Sequence: Synthetic polypeptide
SSSVPSQKTYQVSYGFRLGFLHSGTAKSVTCTYSPALNKM

SEQ ID NO: 215 - protein, 40 aa, Artificial Sequence
  Description of Artificial Sequence: Synthetic polypeptide
SSVPSQKTYQVSYGFRLGFLHSGTAKSVTCTYSPALNKMF

SEQ ID NO: 216 - protein, 40 aa, Artificial Sequence
  Description of Artificial Sequence: Synthetic polypeptide
SVPSQKTYQVSYGFRLGFLHSGTAKSVTCTYSPALNKMFC

SEQ ID NO: 217 - protein, 40 aa, Artificial Sequence
  Description of Artificial Sequence: Synthetic polypeptide
QVSYGFRLGFLHSGTAKSVTCTYSPALNKMFCQLAKTCPV

SEQ ID NO: 218 - protein, 40 aa, Artificial Sequence
  Description of Artificial Sequence: Synthetic polypeptide
AAPAPAPSWPLSSSVPSQKTYQGSYGSRLGFLHSGTAKSV

SEQ ID NO: 219 - protein, 40 aa, Artificial Sequence
  Description of Artificial Sequence: Synthetic polypeptide
WPLSSSVPSQKTYQGSYGSRLGFLHSGTAKSVTCTYSPAL

SEQ ID NO: 220 - protein, 40 aa, Artificial Sequence
  Description of Artificial Sequence: Synthetic polypeptide
APSWPLSSSVPSQKTYQGSYGVRLGFLHSGTAKSVTCTYS

SEQ ID NO: 221 - protein, 40 aa, Artificial Sequence
  Description of Artificial Sequence: Synthetic polypeptide
AAPTPAAPAPAPSWPLSSSVPSQKTYQGSYGFRRGFLHSG

SEQ ID NO: 222 - protein, 40 aa, Artificial Sequence
  Description of Artificial Sequence: Synthetic polypeptide
PAPSWPLSSSVPSQKTYQGSYGFRRGFLHSGTAKSVTCTY

SEQ ID NO: 223 - protein, 40 aa, Artificial Sequence
  Description of Artificial Sequence: Synthetic polypeptide
SVPSQKTYQGSYGFRRGFLHSGTAKSVTCTYSPALNKMFC

SEQ ID NO: 224 - protein, 40 aa, Artificial Sequence
  Description of Artificial Sequence: Synthetic polypeptide
YGFRRGFLHSGTAKSVTCTYSPALNKMFCQLAKTCPVQLW

SEQ ID NO: 225 - protein, 40 aa, Artificial Sequence
  Description of Artificial Sequence: Synthetic polypeptide
APAPAPSWPLSSSVPSQKTYQGSYGFRLGVLHSGTAKSVT

SEQ ID NO: 226 - protein, 40 aa, Artificial Sequence
  Description of Artificial Sequence: Synthetic polypeptide
PAPAPSWPLSSSVPSQKTYQGSYGFRLGVLHSGTAKSVTC

SEQ ID NO: 227 - protein, 40 aa, Artificial Sequence
  Description of Artificial Sequence: Synthetic polypeptide
APAPSWPLSSSVPSQKTYQGSYGFRLGVLHSGTAKSVTCT

SEQ ID NO: 228 - protein, 40 aa, Artificial Sequence
  Description of Artificial Sequence: Synthetic polypeptide
KTYQGSYGFRLGVLHSGTAKSVTCTYSPALNKMFCQLAKT

SEQ ID NO: 229 - protein, 40 aa, Artificial Sequence
  Description of Artificial Sequence: Synthetic polypeptide
GFRLGVLHSGTAKSVTCTYSPALNKMFCQLAKTCPVQLWV

SEQ ID NO: 230 - protein, 40 aa, Artificial Sequence
  Description of Artificial Sequence: Synthetic polypeptide
PAPAPSWPLSSSVPSQKTYQGSYGFRLGFLHSGTAKYVTC

SEQ ID NO: 231 - protein, 40 aa, Artificial Sequence
  Description of Artificial Sequence: Synthetic polypeptide
SSSVPSQKTYQGSYGFRLGFLHSGTAKYVTCTYSPALNKM

SEQ ID NO: 232 - protein, 40 aa, Artificial Sequence
  Description of Artificial Sequence: Synthetic polypeptide
LSSSVPSQKTYQGSYGFRLGFLHSGTAKSVTCMYSPALNK

SEQ ID NO: 233 - protein, 40 aa, Artificial Sequence
  Description of Artificial Sequence: Synthetic polypeptide
SSSVPSQKTYQGSYGFRLGFLHSGTAKSVTCMYSPALNKM

SEQ ID NO: 234 - protein, 40 aa, Artificial Sequence
  Description of Artificial Sequence: Synthetic polypeptide
APAPSWPLSSSVPSQKTYQGSYGFRLGFLHSGTAKSVTCP

SEQ ID NO: 235 - protein, 40 aa, Artificial Sequence
  Description of Artificial Sequence: Synthetic polypeptide
WPLSSSVPSQKTYQGSYGFRLGFLHSGTAKSVTCPYSPAL

SEQ ID NO: 236 - protein, 40 aa, Artificial Sequence
  Description of Artificial Sequence: Synthetic polypeptide
LSSSVPSQKTYQGSYGFRLGFLHSGTAKSVTCPYSPALNK

SEQ ID NO: 237 - protein, 40 aa, Artificial Sequence
  Description of Artificial Sequence: Synthetic polypeptide
SSVPSQKTYQGSYGFRLGFLHSGTAKSVTCPYSPALNKMF

SEQ ID NO: 238 - protein, 40 aa, Artificial Sequence
  Description of Artificial Sequence: Synthetic polypeptide
PAPSWPLSSSVPSQKTYQGSYGFRLGFLHSGTAKSVTCTS

SEQ ID NO: 239 - protein, 40 aa, Artificial Sequence
  Description of Artificial Sequence: Synthetic polypeptide
APSWPLSSSVPSQKTYQGSYGFRLGFLHSGTAKSVTCTSS

SEQ ID NO: 240 - protein, 40 aa, Artificial Sequence
  Description of Artificial Sequence: Synthetic polypeptide
TYQGSYGFRLGFLHSGTAKSVTCTSSPALNKMFCQLAKTC

SEQ ID NO: 241 - protein, 40 aa, Artificial Sequence
  Description of Artificial Sequence: Synthetic polypeptide
SWPLSSSVPSQKTYQGSYGFRLGFLHSGTAKSVTCTYPPA

SEQ ID NO: 242 - protein, 40 aa, Artificial Sequence
  Description of Artificial Sequence: Synthetic polypeptide
LSSSVPSQKTYQGSYGFRLGFLHSGTAKSVTCTYPPALNK

SEQ ID NO: 243 - protein, 40 aa, Artificial Sequence
  Description of Artificial Sequence: Synthetic polypeptide
APSWPLSSSVPSQKTYQGSYGFRLGFLHSGTAKSVTCTYY

SEQ ID NO: 244 - protein, 40 aa, Artificial Sequence
  Description of Artificial Sequence: Synthetic polypeptide
YYPALNKMFCQLAKTCPVQLWVDSTPPPGTRVRAMAIYKQ

SEQ ID NO: 245 - protein, 40 aa, Artificial Sequence
  Description of Artificial Sequence: Synthetic polypeptide
SSSVPSQKTYQGSYGFRLGFLHSGTAKSVTCTYSPARNKM

SEQ ID NO: 246 - protein, 40 aa, Artificial Sequence
  Description of Artificial Sequence: Synthetic polypeptide
VPSQKTYQGSYGFRLGFLHSGTAKSVTCTYSPARNKMFCQ

SEQ ID NO: 247 - protein, 40 aa, Artificial Sequence
  Description of Artificial Sequence: Synthetic polypeptide
LSSSVPSQKTYQGSYGFRLGFLHSGTAKSVTCTYSPAVNK

SEQ ID NO: 248 - protein, 40 aa, Artificial Sequence
  Description of Artificial Sequence: Synthetic polypeptide
TYSPAVNKMFCQLAKTCPVQLWVDSTPPPGTRVRAMAIYK

SEQ ID NO: 249 - protein, 40 aa, Artificial Sequence
  Description of Artificial Sequence: Synthetic polypeptide
YQGSYGFRLGFLHSGTAKSVTCTYSPALIKMFCQLAKTCP

SEQ ID NO: 250 - protein, 40 aa, Artificial Sequence
  Description of Artificial Sequence: Synthetic polypeptide
SSVPSQKTYQGSYGFRLGFLHSGTAKSVTCTYSPALNNMF

SEQ ID NO: 251 - protein, 40 aa, Artificial Sequence
  Description of Artificial Sequence: Synthetic polypeptide
TYQGSYGFRLGFLHSGTAKSVTCTYSPALNKMLCQLAKTC

SEQ ID NO: 252 - protein, 40 aa, Artificial Sequence
  Description of Artificial Sequence: Synthetic polypeptide
SPALNKMLCQLAKTCPVQLWVDSTPPPGTRVRAMAIYKQS

SEQ ID NO: 253 - protein, 40 aa, Artificial Sequence
  Description of Artificial Sequence: Synthetic polypeptide
KTYQGSYGFRLGFLHSGTAKSVTCTYSPALNKMFRQLAKT

SEQ ID NO: 254 - protein, 40 aa, Artificial Sequence
  Description of Artificial Sequence: Synthetic polypeptide
TAKSVTCTYSPALNKMFRQLAKTCPVQLWVDSTPPPGTRV

SEQ ID NO: 255 - protein, 40 aa, Artificial Sequence
  Description of Artificial Sequence: Synthetic polypeptide
ALNKMFRQLAKTCPVQLWVDSTPPPGTRVRAMAIYKQSQH

SEQ ID NO: 256 - protein, 40 aa, Artificial Sequence
  Description of Artificial Sequence: Synthetic polypeptide
SPALNKMFYQLAKTCPVQLWVDSTPPPGTRVRAMAIYKQS

SEQ ID NO: 257 - protein, 40 aa, Artificial Sequence
  Description of Artificial Sequence: Synthetic polypeptide
PALNKMFCHLAKTCPVQLWVDSTPPPGTRVRAMAIYKQSQ

SEQ ID NO: 258 - protein, 40 aa, Artificial Sequence
  Description of Artificial Sequence: Synthetic polypeptide
CHLAKTCPVQLWVDSTPPPGTRVRAMAIYKQSQHMTEVVR

SEQ ID NO: 259 - protein, 40 aa, Artificial Sequence
  Description of Artificial Sequence: Synthetic polypeptide
GSYGFRLGFLHSGTAKSVTCTYSPALNKMFCQQAKTCPVQ

SEQ ID NO: 260 - protein, 40 aa, Artificial Sequence
  Description of Artificial Sequence: Synthetic polypeptide
PALNKMFCQQAKTCPVQLWVDSTPPPGTRVRAMAIYKQSQ

SEQ ID NO: 261 - protein, 40 aa, Artificial Sequence
  Description of Artificial Sequence: Synthetic polypeptide
KSVTCTYSPALNKMFCQLAKTRPVQLWVDSTPPPGTRVRA

SEQ ID NO: 262 - protein, 40 aa, Artificial Sequence
  Description of Artificial Sequence: Synthetic polypeptide
PALNKMFCQLAKTRPVQLWVDSTPPPGTRVRAMAIYKQSQ

SEQ ID NO: 263 - protein, 40 aa, Artificial Sequence
  Description of Artificial Sequence: Synthetic polypeptide
NKMFCQLAKTRPVQLWVDSTPPPGTRVRAMAIYKQSQHMT

SEQ ID NO: 264 - protein, 40 aa, Artificial Sequence
  Description of Artificial Sequence: Synthetic polypeptide
CQLAKTRPVQLWVDSTPPPGTRVRAMAIYKQSQHMTEVVR

SEQ ID NO: 265 - protein, 40 aa, Artificial Sequence
  Description of Artificial Sequence: Synthetic polypeptide
TRPVQLWVDSTPPPGTRVRAMAIYKQSQHMTEVVRRCPHH

SEQ ID NO: 266 - protein, 40 aa, Artificial Sequence
  Description of Artificial Sequence: Synthetic polypeptide
SYGFRLGFLHSGTAKSVTCTYSPALNKMFCQLAKTYPVQL

SEQ ID NO: 267 - protein, 40 aa, Artificial Sequence
  Description of Artificial Sequence: Synthetic polypeptide
AKSVTCTYSPALNKMFCQLAKTYPVQLWVDSTPPPGTRVR

SEQ ID NO: 268 - protein, 40 aa, Artificial Sequence
  Description of Artificial Sequence: Synthetic polypeptide
QGSYGFRLGFLHSGTAKSVTCTYSPALNKMFCQLAKTCPA

SEQ ID NO: 269 - protein, 40 aa, Artificial Sequence
  Description of Artificial Sequence: Synthetic polypeptide
PALNKMFCQLAKTCPAQLWVDSTPPPGTRVRAMAIYKQSQ

SEQ ID NO: 270 - protein, 40 aa, Artificial Sequence
  Description of Artificial Sequence: Synthetic polypeptide
GSYGFRLGFLHSGTAKSVTCTYSPALNKMFCQLAKTCPMQ

SEQ ID NO: 271 - protein, 40 aa, Artificial Sequence
  Description of Artificial Sequence: Synthetic polypeptide
ALNKMFCQLAKTCPMQLWVDSTPPPGTRVRAMAIYKQSQH

SEQ ID NO: 272 - protein, 40 aa, Artificial Sequence
  Description of Artificial Sequence: Synthetic polypeptide
LAKTCPVHLWVDSTPPPGTRVRAMAIYKQSQHMTEVVRRC

SEQ ID NO: 273 - protein, 40 aa, Artificial Sequence
  Description of Artificial Sequence: Synthetic polypeptide
KTCPVHLWVDSTPPPGTRVRAMAIYKQSQHMTEVVRRCPH

SEQ ID NO: 274 - protein, 40 aa, Artificial Sequence
  Description of Artificial Sequence: Synthetic polypeptide
TCPVHLWVDSTPPPGTRVRAMAIYKQSQHMTEVVRRCPHH

SEQ ID NO: 275 - protein, 40 aa, Artificial Sequence
  Description of Artificial Sequence: Synthetic polypeptide
LAKTCPVPLWVDSTPPPGTRVRAMAIYKQSQHMTEVVRRC

SEQ ID NO: 276 - protein, 40 aa, Artificial Sequence
  Description of Artificial Sequence: Synthetic polypeptide
SPALNKMFCQLAKTCPVQPWVDSTPPPGTRVRAMAIYKQS

SEQ ID NO: 277 - protein, 40 aa, Artificial Sequence
  Description of Artificial Sequence: Synthetic polypeptide
QLAKTCPVQPWVDSTPPPGTRVRAMAIYKQSQHMTEVVRR

SEQ ID NO: 278 - protein, 40 aa, Artificial Sequence
  Description of Artificial Sequence: Synthetic polypeptide
PVQLWGDSTPPPGTRVRAMAIYKQSQHMTEVVRRCPHHER

SEQ ID NO: 279 - protein, 40 aa, Artificial Sequence
  Description of Artificial Sequence: Synthetic polypeptide
VQLWGDSTPPPGTRVRAMAIYKQSQHMTEVVRRCPHHERC

SEQ ID NO: 280 - protein, 40 aa, Artificial Sequence
  Description of Artificial Sequence: Synthetic polypeptide
LNKMFCQLAKTCPVQLWVDSTHPPGTRVRAMAIYKQSQHM

SEQ ID NO: 281 - protein, 40 aa, Artificial Sequence
  Description of Artificial Sequence: Synthetic polypeptide
YSPALNKMFCQLAKTCPVQLWVDSTPLPGTRVRAMAIYKQ

SEQ ID NO: 282 - protein, 40 aa, Artificial Sequence
  Description of Artificial Sequence: Synthetic polypeptide
AKSVTCTYSPALNKMFCQLAKTCPVQLWVDSTPSPGTRVR

SEQ ID NO: 283 - protein, 40 aa, Artificial Sequence
  Description of Artificial Sequence: Synthetic polypeptide
ALNKMFCQLAKTCPVQLWVDSTPSPGTRVRAMAIYKQSQH

SEQ ID NO: 284 - protein, 40 aa, Artificial Sequence
  Description of Artificial Sequence: Synthetic polypeptide
LAKTCPVQLWVDSTPSPGTRVRAMAIYKQSQHMTEVVRRC

SEQ ID NO: 285 - protein, 40 aa, Artificial Sequence
  Description of Artificial Sequence: Synthetic polypeptide
QLWVDSTPSPGTRVRAMAIYKQSQHMTEVVRRCPHHERCS

SEQ ID NO: 286 - protein, 40 aa, Artificial Sequence
  Description of Artificial Sequence: Synthetic polypeptide
QLAKTCPVQLWVDSTPPPGTRVRAMDIYKQSQHMTEVVRR

SEQ ID NO: 287 - protein, 40 aa, Artificial Sequence
  Description of Artificial Sequence: Synthetic polypeptide
QLWVDSTPPPGTRVRAMTIYKQSQHMTEVVRRCPHHERCS

SEQ ID NO: 288 - protein, 40 aa, Artificial Sequence
  Description of Artificial Sequence: Synthetic polypeptide
PALNKMFCQLAKTCPVQLWVDSTPPPGTRVRAMAFYKQSQ

SEQ ID NO: 289 - protein, 40 aa, Artificial Sequence
  Description of Artificial Sequence: Synthetic polypeptide
PVQLWVDSTPPPGTRVRAMAFYKQSQHMTEVVRRCPHHER

SEQ ID NO: 290 - protein, 40 aa, Artificial Sequence
  Description of Artificial Sequence: Synthetic polypeptide
PVQLWVDSTPPPGTRVRAMANYKQSQHMTEVVRRCPHHER

SEQ ID NO: 291 - protein, 40 aa, Artificial Sequence
  Description of Artificial Sequence: Synthetic polypeptide
PALNKMFCQLAKTCPVQLWVDSTPPPGTRVRAMAICKQSQ

SEQ ID NO: 292 - protein, 40 aa, Artificial Sequence
  Description of Artificial Sequence: Synthetic polypeptide
CQLAKTCPVQLWVDSTPPPGTRVRAMAIHKQSQHMTEVVR

SEQ ID NO: 293 - protein, 40 aa, Artificial Sequence
  Description of Artificial Sequence: Synthetic polypeptide
QLAKTCPVQLWVDSTPPPGTRVRAMAIHKQSQHMTEVVRR

SEQ ID NO: 294 - protein, 40 aa, Artificial Sequence
  Description of Artificial Sequence: Synthetic polypeptide
AKTCPVQLWVDSTPPPGTRVRAMAIHKQSQHMTEVVRRCP

SEQ ID NO: 295 - protein, 40 aa, Artificial Sequence
  Description of Artificial Sequence: Synthetic polypeptide
CQLAKTCPVQLWVDSTPPPGTRVRAMAIYKQSQHMTKVVR

SEQ ID NO: 296 - protein, 40 aa, Artificial Sequence
  Description of Artificial Sequence: Synthetic polypeptide
VQLWVDSTPPPGTRVRAMAIYKQSQHMTKVVRRCPHHERC

SEQ ID NO: 297 - protein, 40 aa, Artificial Sequence
  Description of Artificial Sequence: Synthetic polypeptide
LWVDSTPPPGTRVRAMAIYKQSQHMTKVVRRCPHHERCSD

SEQ ID NO: 298 - protein, 40 aa, Artificial Sequence
  Description of Artificial Sequence: Synthetic polypeptide
KTCPVQLWVDSTPPPGTRVRAMAIYKQSQHMTEDVRRCPH

SEQ ID NO: 299 - protein, 40 aa, Artificial Sequence
  Description of Artificial Sequence: Synthetic polypeptide
PVQLWVDSTPPPGTRVRAMAIYKQSQHMTEFVRRCPHHER

SEQ ID NO: 300 - protein, 40 aa, Artificial Sequence
  Description of Artificial Sequence: Synthetic polypeptide
LAKTCPVQLWVDSTPPPGTRVRAMAIYKQSQHMTEVGRRC

SEQ ID NO: 301 - protein, 40 aa, Artificial Sequence
  Description of Artificial Sequence: Synthetic polypeptide
LAKTCPVQLWVDSTPPPGTRVRAMAIYKQSQHMTEVVRRF

SEQ ID NO: 302 - protein, 40 aa, Artificial Sequence
  Description of Artificial Sequence: Synthetic polypeptide
TCPVQLWVDSTPPPGTRVRAMAIYKQSQHMTEVVRRRPHH

SEQ ID NO: 303 - protein, 40 aa, Artificial Sequence
  Description of Artificial Sequence: Synthetic polypeptide
CPVQLWVDSTPPPGTRVRAMAIYKQSQHMTEVVRRRPHHE

SEQ ID NO: 304 - protein, 40 aa, Artificial Sequence
  Description of Artificial Sequence: Synthetic polypeptide
STPPPGTRVRAMAIYKQSQHMTEVVRRRPHHERCSDSDGL

SEQ ID NO: 305 - protein, 40 aa, Artificial Sequence
  Description of Artificial Sequence: Synthetic polypeptide
LWVDSTPPPGTRVRAMAIYKQSQHMTEVVRRCRHHERCSD

SEQ ID NO: 306 - protein, 40 aa, Artificial Sequence
  Description of Artificial Sequence: Synthetic polypeptide
VQLWVDSTPPPGTRVRAMAIYKQSQHMTEVVRRCPQHERC

SEQ ID NO: 307 - protein, 40 aa, Artificial Sequence
  Description of Artificial Sequence: Synthetic polypeptide
RVRAMAIYKQSQHMTEVVRRCPHRERCSDSDGLAPPQHLI

SEQ ID NO: 308 - protein, 40 aa, Artificial Sequence
  Description of Artificial Sequence: Synthetic polypeptide
WVDSTPPPGTRVRAMAIYKQSQHMTEVVRRCPHHKRCSDS

SEQ ID NO: 309 - protein, 40 aa, Artificial Sequence
  Description of Artificial Sequence: Synthetic polypeptide
VRAMAIYKQSQHMTEVVRRCPHHERCSDSDGLAPPQRLIR

SEQ ID NO: 310 - protein, 40 aa, Artificial Sequence
  Description of Artificial Sequence: Synthetic polypeptide
GGMNRRPILTIITLGDSSGNLLGRNSFEVRVCACPGRDRR

SEQ ID NO: 311 - protein, 40 aa, Artificial Sequence
  Description of Artificial Sequence: Synthetic polypeptide
MGGMNRRPILTIITLKDSSGNLLGRNSFEVRVCACPGRDR

SEQ ID NO: 312 - protein, 40 aa, Artificial Sequence
  Description of Artificial Sequence: Synthetic polypeptide
GGMNRRPILTIITLKDSSGNLLGRNSFEVRVCACPGRDRR

SEQ ID NO: 313 - protein, 40 aa, Artificial Sequence
  Description of Artificial Sequence: Synthetic polypeptide
GGMNRRPILTIITLEVSSGNLLGRNSFEVRVCACPGRDRR

SEQ ID NO: 314 - protein, 40 aa, Artificial Sequence
  Description of Artificial Sequence: Synthetic polypeptide
GGMNRRPILTIITLEYSSGNLLGRNSFEVRVCACPGRDRR

SEQ ID NO: 315 - protein, 40 aa, Artificial Sequence
  Description of Artificial Sequence: Synthetic polypeptide
GGMNRRPILTIITLEDSSGNLLRRNSFEVRVCACPGRDRR

SEQ ID NO: 316 - protein, 40 aa, Artificial Sequence
  Description of Artificial Sequence: Synthetic polypeptide
GMNRRPILTIITLEDSSGNLLRRNSFEVRVCACPGRDRRT

SEQ ID NO: 317 - protein, 40 aa, Artificial Sequence
  Description of Artificial Sequence: Synthetic polypeptide
SCMGGMNRRPILTIITLEDSSGNLLGRNSFKVRVCACPGR

SEQ ID NO: 318 - protein, 40 aa, Artificial Sequence
  Description of Artificial Sequence: Synthetic polypeptide
GGMNRRPILTIITLEDSSGNLLGRNSFKVRVCACPGRDRR

SEQ ID NO: 319 - protein, 40 aa, Artificial Sequence
  Description of Artificial Sequence: Synthetic polypeptide
GMNRRPILTIITLEDSSGNLLGRNSFKVRVCACPGRDRRT

SEQ ID NO: 320 - protein, 40 aa, Artificial Sequence
  Description of Artificial Sequence: Synthetic polypeptide
MNRRPILTIITLEDSSGNLLGRNSFKVRVCACPGRDRRTE

SEQ ID NO: 321 - protein, 40 aa, Artificial Sequence
  Description of Artificial Sequence: Synthetic polypeptide
GMNRRPILTIITLEDSSGNLLGRNSFVVRVCACPGRDRRT

SEQ ID NO: 322 - protein, 40 aa, Artificial Sequence
  Description of Artificial Sequence: Synthetic polypeptide
RVYACPGRDRRTEEENLRKKGEPHHELPPGSTKRALPNNT

SEQ ID NO: 323 - protein, 40 aa, Artificial Sequence
  Description of Artificial Sequence: Synthetic polypeptide
RVCPCPGRDRRTEEENLRKKGEPHHELPPGSTKRALPNNT

SEQ ID NO: 324 - protein, 40 aa, Artificial Sequence
  Description of Artificial Sequence: Synthetic polypeptide
VRVCAYPGRDRRTEEENLRKKGEPHHELPPGSTKRALPNN

SEQ ID NO: 325 - protein, 40 aa, Artificial Sequence
  Description of Artificial Sequence: Synthetic polypeptide
GRNSFEVRVCACRGRDRRTEEENLRKKGEPHHELPPGSTK

SEQ ID NO: 326 - protein, 40 aa, Artificial Sequence
  Description of Artificial Sequence: Synthetic polypeptide
VCACPRRDRRTEEENLRKKGEPHHELPPGSTKRALPNNTS

SEQ ID NO: 327 - protein, 40 aa, Artificial Sequence
  Description of Artificial Sequence: Synthetic polypeptide
RNSFEVRVCACPGKDRRTEEENLRKKGEPHHELPPGSTKR

SEQ ID NO: 328 - protein, 40 aa, Artificial Sequence
  Description of Artificial Sequence: Synthetic polypeptide
GGMNRRPILTIITLEDSSGNLLGRNSFEVRVCACPGRVRR

SEQ ID NO: 329 - protein, 40 aa, Artificial Sequence
  Description of Artificial Sequence: Synthetic polypeptide
GMNRRPILTIITLEDSSGNLLGRNSFEVRVCACPGRVRRT

SEQ ID NO: 330 - protein, 40 aa, Artificial Sequence
  Description of Artificial Sequence: Synthetic polypeptide
CPGRVRRTEEENLRKKGEPHHELPPGSTKRALPNNTSSSP

SEQ ID NO: 331 - protein, 40 aa, Artificial Sequence
  Description of Artificial Sequence: Synthetic polypeptide
PTEEENLRKKGEPHHELPPGSTKRALPNNTSSSPQPKKKP

SEQ ID NO: 332 - protein, 40 aa, Artificial Sequence
  Description of Artificial Sequence: Synthetic polypeptide
MNRRPILTIITLEDSSGNLLGRNSFEVRVCACPGRDRRTK

SEQ ID NO: 333 - protein, 40 aa, Artificial Sequence
  Description of Artificial Sequence: Synthetic polypeptide
FEVRVCACPGRDRRTEGENLRKKGEPHHELPPGSTKRALP

SEQ ID NO: 334 - protein, 40 aa, Artificial Sequence
  Description of Artificial Sequence: Synthetic polypeptide
PGRDRRTEGENLRKKGEPHHELPPGSTKRALPNNTSSSPQ

SEQ ID NO: 335 - protein, 40 aa, Artificial Sequence
  Description of Artificial Sequence: Synthetic polypeptide
EQENLRKKGEPHHELPPGSTKRALPNNTSSSPQPKKKPLD

SEQ ID NO: 336 - protein, 40 aa, Artificial Sequence
  Description of Artificial Sequence: Synthetic polypeptide
HELPPGSTKRALPNNTSSSPQPKKKPLDGEYFTLQFRGRE

SEQ ID NO: 337 - protein, 40 aa, Artificial Sequence
  Description of Artificial Sequence: Synthetic polypeptide
PHHELPPGSTKRALPNNTSSSPQPKKKPLDGEYFTLQIRV

SEQ ID NO: 338 - protein, 40 aa, Artificial Sequence
  Description of Artificial Sequence: Synthetic polypeptide
HELPPGSTKRALPNNTSSSPQPKKKPLDGEYFTLQIRVRE

SEQ ID NO: 339 - protein, 40 aa, Artificial Sequence
  Description of Artificial Sequence: Synthetic polypeptide
HELPPGSTKRALPNNTSSSPQPKKKPLDGEYFTLQIRWRE

SEQ ID NO: 340 - protein, 40 aa, Artificial Sequence
  Description of Artificial Sequence: Synthetic polypeptide
ELPPGSTKRALPNNTSSSPQPKKKPLDGEYFTLQIRGREH

SEQ ID NO: 341 - protein, 40 aa, Artificial Sequence
  Description of Artificial Sequence: Synthetic polypeptide
ELPPGSTKRALPNNTSSSPQPKKKPLDGEYFTLQIRGRES

SEQ ID NO: 342 - protein, 40 aa, Artificial Sequence
  Description of Artificial Sequence: Synthetic polypeptide
FCNRSPRVVLPVWLNFDGEPQPYPTLPPGTGRRIHSYRGN

SEQ ID NO: 343 - protein, 40 aa, Artificial Sequence
  Description of Artificial Sequence: Synthetic polypeptide
CNRSPRVVLPVWLNFDGEPQPYPTLPPGTGRRIHSYRGNL

SEQ ID NO: 344 - protein, 40 aa, Artificial Sequence
  Description of Artificial Sequence: Synthetic polypeptide
NRSPRVVLPVWLNFDGEPQPYPTLPPGTGRRIHSYRGNLW

SEQ ID NO: 345 - protein, 40 aa, Artificial Sequence
  Description of Artificial Sequence: Synthetic polypeptide
PRVVLPVWLNFDGEPQPYPTLPPGTGRRIHSYRGNLWLFR

SEQ ID NO: 346 - protein, 40 aa, Artificial Sequence
  Description of Artificial Sequence: Synthetic polypeptide
PRVVLPVWLNFDGEPQPYPTLPPGTGRRIHSYRGHLWPFR

SEQ ID NO: 347 - protein, 40 aa, Artificial Sequence
  Description of Artificial Sequence: Synthetic polypeptide
QPIFANITPPVYTLKERCLQVVRSLVKPENYRRLDIVRSL

SEQ ID NO: 348 - protein, 40 aa, Artificial Sequence
  Description of Artificial Sequence: Synthetic polypeptide
PIFANITPPVYTLKERCLQVVRSLVKPENYRRLDIVRSLY

SEQ ID NO: 349 - protein, 40 aa, Artificial Sequence
  Description of Artificial Sequence: Synthetic polypeptide
ANITLPVYTLKERRLQVVRSLVKPENYRRLDIVRSLYEDL

SEQ ID NO: 350 - protein, 40 aa, Artificial Sequence
  Description of Artificial Sequence: Synthetic polypeptide
SDDWEIPDGQITVGQRIVSGSFGTVYKGKWHGDVAVKMLN

SEQ ID NO: 351 - protein, 40 aa, Artificial Sequence
  Description of Artificial Sequence: Synthetic polypeptide
KSSSSSEDRNRMKTLGRRDSSDDWEIPDGQITVGQRIGSE

SEQ ID NO: 352 - protein, 40 aa, Artificial Sequence
  Description of Artificial Sequence: Synthetic polypeptide
DDWEIPDGQITVGQRIGSESFGTVYKGKWHGDVAVKMLNV

SEQ ID NO: 353 - protein, 40 aa, Artificial Sequence
  Description of Artificial Sequence: Synthetic polypeptide
VGQRIGSESFGTVYKGKWHGDVAVKMLNVTAPTPQQLQAF

SEQ ID NO: 354 - protein, 40 aa, Artificial Sequence
  Description of Artificial Sequence: Synthetic polypeptide
IGSGLFGTVYKGKWHGDVAVKMLNVTAPTPQQLQAFKNEV

SEQ ID NO: 355 - protein, 40 aa, Artificial Sequence
  Description of Artificial Sequence: Synthetic polypeptide
GRRDSSDDWEIPDGQITVGQRIGSGSCGTVYKGKWHGDVA

SEQ ID NO: 356 - protein, 40 aa, Artificial Sequence
  Description of Artificial Sequence: Synthetic polypeptide
SSEDRNRMKTLGRRDSSDDWEIPDGQITVGQRIGSGSFAT

SEQ ID NO: 357 - protein, 40 aa, Artificial Sequence
  Description of Artificial Sequence: Synthetic polypeptide
MKTLGRRDSSDDWEIPDGQITVGQRIGSGSFATVYKGKWH

SEQ ID NO: 358 - protein, 40 aa, Artificial Sequence
  Description of Artificial Sequence: Synthetic polypeptide
SSEDRNRMKTLGRRDSSDDWEIPDGQITVGQRIGSGSFRT

SEQ ID NO: 359 - protein, 40 aa, Artificial Sequence
  Description of Artificial Sequence: Synthetic polypeptide
RRDSSDDWEIPDGQITVGQRIGSGSFRTVYKGKWHGDVAV

SEQ ID NO: 360 - protein, 40 aa, Artificial Sequence
  Description of Artificial Sequence: Synthetic polypeptide
TKFEMIKLIDIARQTAQGMDYLDAKSIIHRDLKSNNIFLH

SEQ ID NO: 361 - protein, 40 aa, Artificial Sequence
  Description of Artificial Sequence: Synthetic polypeptide
KFEMIKLIDIARQTAQGMDYLDAKSIIHRDLKSNNIFLHE

SEQ ID NO: 362 - protein, 40 aa, Artificial Sequence
  Description of Artificial Sequence: Synthetic polypeptide
FEMIKLIDIARQTAQGMDYLDAKSIIHRDLKSNNIFLHED

SEQ ID NO: 363 - protein, 40 aa, Artificial Sequence
  Description of Artificial Sequence: Synthetic polypeptide
MIKLIDIARQTAQGMDYLDAKSIIHRDLKSNNIFLHEDLT

SEQ ID NO: 364 - protein, 40 aa, Artificial Sequence
  Description of Artificial Sequence: Synthetic polypeptide
KLIDIARQTAQGMDYLDAKSIIHRDLKSNNIFLHEDLTVK

SEQ ID NO: 365 - protein, 40 aa, Artificial Sequence
  Description of Artificial Sequence: Synthetic polypeptide
LIDIARQTAQGMDYLDAKSIIHRDLKSNNIFLHEDLTVKI

SEQ ID NO: 366 - protein, 40 aa, Artificial Sequence
  Description of Artificial Sequence: Synthetic polypeptide
IDIARQTAQGMDYLDAKSIIHRDLKSNNIFLHEDLTVKIG

SEQ ID NO: 367 - protein, 40 aa, Artificial Sequence
  Description of Artificial Sequence: Synthetic polypeptide
IARQTAQGMDYLDAKSIIHRDLKSNNIFLHEDLTVKIGDF

SEQ ID NO: 368 - protein, 40 aa, Artificial Sequence
  Description of Artificial Sequence: Synthetic polypeptide
ARQTAQGMDYLDAKSIIHRDLKSNNIFLHEDLTVKIGDFG

SEQ ID NO: 369 - protein, 40 aa, Artificial Sequence
  Description of Artificial Sequence: Synthetic polypeptide
RQTAQGMDYLDAKSIIHRDLKSNNIFLHEDLTVKIGDFGL

SEQ ID NO: 370 - protein, 40 aa, Artificial Sequence
  Description of Artificial Sequence: Synthetic polypeptide
QTAQGMDYLDAKSIIHRDLKSNNIFLHEDLTVKIGDFGLA

SEQ ID NO: 371 - protein, 40 aa, Artificial Sequence
  Description of Artificial Sequence: Synthetic polypeptide
AQGMDYLDAKSIIHRDLKSNNIFLHEDLTVKIGDFGLATV

SEQ ID NO: 372 - protein, 40 aa, Artificial Sequence
  Description of Artificial Sequence: Synthetic polypeptide
QGMDYLDAKSIIHRDLKSNNIFLHEDLTVKIGDFGLATVK

SEQ ID NO: 373 - protein, 40 aa, Artificial Sequence
  Description of Artificial Sequence: Synthetic polypeptide
GMDYLDAKSIIHRDLKSNNIFLHEDLTVKIGDFGLATVKS

SEQ ID NO: 374 - protein, 40 aa, Artificial Sequence
  Description of Artificial Sequence: Synthetic polypeptide
MDYLDAKSIIHRDLKSNNIFLHEDLTVKIGDFGLATVKSR

SEQ ID NO: 375 - protein, 40 aa, Artificial Sequence
  Description of Artificial Sequence: Synthetic polypeptide
DYLDAKSIIHRDLKSNNIFLHEDLTVKIGDFGLATVKSRW

SEQ ID NO: 376 - protein, 40 aa, Artificial Sequence
  Description of Artificial Sequence: Synthetic polypeptide
YLDAKSIIHRDLKSNNIFLHEDLTVKIGDFGLATVKSRWS

SEQ ID NO: 377 - protein, 40 aa, Artificial Sequence
  Description of Artificial Sequence: Synthetic polypeptide
LDAKSIIHRDLKSNNIFLHEDLTVKIGDFGLATVKSRWSG

SEQ ID NO: 378 - protein, 40 aa, Artificial Sequence
  Description of Artificial Sequence: Synthetic polypeptide
DAKSIIHRDLKSNNIFLHEDLTVKIGDFGLATVKSRWSGS

SEQ ID NO: 379 - protein, 40 aa, Artificial Sequence
  Description of Artificial Sequence: Synthetic polypeptide
IETKFEMIKLIDIARQTAQGMDYLHAKSIIHKDLKSNNIF

SEQ ID NO: 380 - protein, 40 aa, Artificial Sequence
  Description of Artificial Sequence: Synthetic polypeptide
ETKFEMIKLIDIARQTAQGMDYLHAKSIIHKDLKSNNIFL

SEQ ID NO: 381 - protein, 40 aa, Artificial Sequence
  Description of Artificial Sequence: Synthetic polypeptide
TKFEMIKLIDIARQTAQGMDYLHAKSIIHKDLKSNNIFLH

SEQ ID NO: 382 - protein, 40 aa, Artificial Sequence
  Description of Artificial Sequence: Synthetic polypeptide
KFEMIKLIDIARQTAQGMDYLHAKSIIHKDLKSNNIFLHE

SEQ ID NO: 383 - protein, 40 aa, Artificial Sequence
  Description of Artificial Sequence: Synthetic polypeptide
IARQTAQGMDYLHAKSIIHKDLKSNNIFLHEDLTVKIGDF

SEQ ID NO: 384 - protein, 40 aa, Artificial Sequence
  Description of Artificial Sequence: Synthetic polypeptide
AQGMDYLHAKSIIHKDLKSNNIFLHEDLTVKIGDFGLATV

SEQ ID NO: 385 - protein, 40 aa, Artificial Sequence
  Description of Artificial Sequence: Synthetic polypeptide
DYLHAKSIIHKDLKSNNIFLHEDLTVKIGDFGLATVKSRW

SEQ ID NO: 386 - protein, 40 aa, Artificial Sequence
  Description of Artificial Sequence: Synthetic polypeptide
AKSIIHKDLKSNNIFLHEDLTVKIGDFGLATVKSRWSGSH

SEQ ID NO: 387 - protein, 40 aa, Artificial Sequence
  Description of Artificial Sequence: Synthetic polypeptide
KSIIHKDLKSNNIFLHEDLTVKIGDFGLATVKSRWSGSHQ

SEQ ID NO: 388 - protein, 40 aa, Artificial Sequence
  Description of Artificial Sequence: Synthetic polypeptide
SIIHKDLKSNNIFLHEDLTVKIGDFGLATVKSRWSGSHQF

SEQ ID NO: 389 - protein, 40 aa, Artificial Sequence
  Description of Artificial Sequence: Synthetic polypeptide
IIHKDLKSNNIFLHEDLTVKIGDFGLATVKSRWSGSHQFE

SEQ ID NO: 390 - protein, 40 aa, Artificial Sequence
  Description of Artificial Sequence: Synthetic polypeptide
KDLKSNNIFLHEDLTVKIGDFGLATVKSRWSGSHQFEQLS

SEQ ID NO: 391 - protein, 40 aa, Artificial Sequence
  Description of Artificial Sequence: Synthetic polypeptide
KSNIIFLHEDLTVKIGDFGLATVKSRWSGSHQFEQLSGSI

SEQ ID NO: 392 - protein, 40 aa, Artificial Sequence
  Description of Artificial Sequence: Synthetic polypeptide
QGMDYLHAKSIIHRDLKSNNIFLHEDLTVKIGGFGLATVK

SEQ ID NO: 393 - protein, 40 aa, Artificial Sequence
  Description of Artificial Sequence: Synthetic polypeptide
GMDYLHAKSIIHRDLKSNNIFLHEDLTVKIGGFGLATVKS

SEQ ID NO: 394 - protein, 40 aa, Artificial Sequence
  Description of Artificial Sequence: Synthetic polypeptide
MDYLHAKSIIHRDLKSNNIFLHEDLTVKIGGFGLATVKSR

SEQ ID NO: 395 - protein, 40 aa, Artificial Sequence
  Description of Artificial Sequence: Synthetic polypeptide
DYLHAKSIIHRDLKSNNIFLHEDLTVKIGGFGLATVKSRW

SEQ ID NO: 396 - protein, 40 aa, Artificial Sequence
  Description of Artificial Sequence: Synthetic polypeptide
SIIHRDLKSNNIFLHEDLTVKIGGFGLATVKSRWSGSHQF

SEQ ID NO: 397 - protein, 40 aa, Artificial Sequence
  Description of Artificial Sequence: Synthetic polypeptide
IHRDLKSNNIFLHEDLTVKIGGFGLATVKSRWSGSHQFEQ

SEQ ID NO: 398 - protein, 40 aa, Artificial Sequence
  Description of Artificial Sequence: Synthetic polypeptide
RDLKSNNIFLHEDLTVKIGGFGLATVKSRWSGSHQFEQLS

SEQ ID NO: 399 - protein, 40 aa, Artificial Sequence
  Description of Artificial Sequence: Synthetic polypeptide
LKSNNIFLHEDLTVKIGGFGLATVKSRWSGSHQFEQLSGS

SEQ ID NO: 400 - protein, 40 aa, Artificial Sequence
  Description of Artificial Sequence: Synthetic polypeptide
NNIFLHEDLTVKIGGFGLATVKSRWSGSHQFEQLSGSILW

SEQ ID NO: 401 - protein, 40 aa, Artificial Sequence
  Description of Artificial Sequence: Synthetic polypeptide
RQTAQGMDYLHAKSIIHRDLKSNNIFLHEDLTVKIGNFGL

SEQ ID NO: 402 - protein, 40 aa, Artificial Sequence
  Description of Artificial Sequence: Synthetic polypeptide
AQGMDYLHAKSIIHRDLKSNNIFLHEDLTVKIGNFGLATV

SEQ ID NO: 403 - protein, 40 aa, Artificial Sequence
  Description of Artificial Sequence: Synthetic polypeptide
QGMDYLHAKSIIHRDLKSNNIFLHEDLTVKIGNFGLATVK

SEQ ID NO: 404 - protein, 40 aa, Artificial Sequence
  Description of Artificial Sequence: Synthetic polypeptide
GMDYLHAKSIIHRDLKSNNIFLHEDLTVKIGNFGLATVKS

SEQ ID NO: 405 - protein, 40 aa, Artificial Sequence
  Description of Artificial Sequence: Synthetic polypeptide
MDYLHAKSIIHRDLKSNNIFLHEDLTVKIGNFGLATVKSR

SEQ ID NO: 406 - protein, 40 aa, Artificial Sequence
  Description of Artificial Sequence: Synthetic polypeptide
DYLHAKSIIHRDLKSNNIFLHEDLTVKIGNFGLATVKSRW

SEQ ID NO: 407 - protein, 40 aa, Artificial Sequence
  Description of Artificial Sequence: Synthetic polypeptide
SIIHRDLKSNNIFLHEDLTVKIGNFGLATVKSRWSGSHQF

SEQ ID NO: 408 - protein, 40 aa, Artificial Sequence
  Description of Artificial Sequence: Synthetic polypeptide
IIHRDLKSNNIFLHEDLTVKIGNFGLATVKSRWSGSHQFE

SEQ ID NO: 409 - protein, 40 aa, Artificial Sequence
  Description of Artificial Sequence: Synthetic polypeptide
IHRDLKSNNIFLHEDLTVKIGNFGLATVKSRWSGSHQFEQ

SEQ ID NO: 410 - protein, 40 aa, Artificial Sequence
  Description of Artificial Sequence: Synthetic polypeptide
HRDLKSNNIFLHEDLTVKIGNFGLATVKSRWSGSHQFEQL

SEQ ID NO: 411 - protein, 40 aa, Artificial Sequence
  Description of Artificial Sequence: Synthetic polypeptide
RDLKSNNIFLHEDLTVKIGNFGLATVKSRWSGSHQFEQLS

SEQ ID NO: 412 - protein, 40 aa, Artificial Sequence
  Description of Artificial Sequence: Synthetic polypeptide
DLKSNNIFLHEDLTVKIGNFGLATVKSRWSGSHQFEQLSG

SEQ ID NO: 413 - protein, 40 aa, Artificial Sequence
  Description of Artificial Sequence: Synthetic polypeptide
LKSNNIFLHEDLTVKIGNFGLATVKSRWSGSHQFEQLSGS

SEQ ID NO: 414 - protein, 40 aa, Artificial Sequence
  Description of Artificial Sequence: Synthetic polypeptide
KSNNIFLHEDLTVKIGNFGLATVKSRWSGSHQFEQLSGSI

SEQ ID NO: 415 - protein, 40 aa, Artificial Sequence
  Description of Artificial Sequence: Synthetic polypeptide
SNNIFLHEDLTVKIGNFGLATVKSRWSGSHQFEQLSGSIL

SEQ ID NO: 416 - protein, 40 aa, Artificial Sequence
  Description of Artificial Sequence: Synthetic polypeptide
NNIFLHEDLTVKIGNFGLATVKSRWSGSHQFEQLSGSILW

SEQ ID NO: 417 - protein, 40 aa, Artificial Sequence
  Description of Artificial Sequence: Synthetic polypeptide
YLHAKSIIHRDLKSNNIFLHEDLTVKIGDFDLATVKSRWS

SEQ ID NO: 418 - protein, 40 aa, Artificial Sequence
  Description of Artificial Sequence: Synthetic polypeptide
AKSIIHRDLKSNNIFLHEDLTVKIGDFDLATVKSRWSGSH

SEQ ID NO: 419 - protein, 40 aa, Artificial Sequence
  Description of Artificial Sequence: Synthetic polypeptide
KSIIHRDLKSNNIFLHEDLTVKIGDFDLATVKSRWSGSHQ

SEQ ID NO: 420 - protein, 40 aa, Artificial Sequence
  Description of Artificial Sequence: Synthetic polypeptide
SIIHRDLKSNNIFLHEDLTVKIGDFDLATVKSRWSGSHQF

SEQ ID NO: 421 - protein, 40 aa, Artificial Sequence
  Description of Artificial Sequence: Synthetic polypeptide
IIHRDLKSNNIFLHEDLTVKIGDFDLATVKSRWSGSHQFE

SEQ ID NO: 422 - protein, 40 aa, Artificial Sequence
  Description of Artificial Sequence: Synthetic polypeptide
IHRDLKSNNIFLHEDLTVKIGDFDLATVKSRWSGSHQFEQ

SEQ ID NO: 423 - protein, 40 aa, Artificial Sequence
  Description of Artificial Sequence: Synthetic polypeptide
RDLKSNNIFLHEDLTVKIGDFDLATVKSRWSGSHQFEQLS

SEQ ID NO: 424 - protein, 40 aa, Artificial Sequence
  Description of Artificial Sequence: Synthetic polypeptide
DLKSNNIFLHEDLTVKIGDFDLATVKSRWSGSHQFEQLSG

SEQ ID NO: 425 - protein, 40 aa, Artificial Sequence
  Description of Artificial Sequence: Synthetic polypeptide
LKSNNIFLHEDLTVKIGDFDLATVKSRWSGSHQFEQLSGS

SEQ ID NO: 426 - protein, 40 aa, Artificial Sequence
  Description of Artificial Sequence: Synthetic polypeptide
KSNNIFLHEDLTVKIGDFDLATVKSRWSGSHQFEQLSGSI

SEQ ID NO: 427 - protein, 40 aa, Artificial Sequence
  Description of Artificial Sequence: Synthetic polypeptide
NNIFLHEDLTVKIGDFDLATVKSRWSGSHQFEQLSGSILW

SEQ ID NO: 428 - protein, 40 aa, Artificial Sequence
  Description of Artificial Sequence: Synthetic polypeptide
HEDLTVKIGDFDLATVKSRWSGSHQFEQLSGSILWMAPEV

SEQ ID NO: 429 - protein, 40 aa, Artificial Sequence
  Description of Artificial Sequence: Synthetic polypeptide
MDYLHAKSIIHRDLKSNNIFLHEDLTVKIGDFSLATVKSR

SEQ ID NO: 430 - protein, 40 aa, Artificial Sequence
  Description of Artificial Sequence: Synthetic polypeptide
DYLHAKSIIHRDLKSNNIFLHEDLTVKIGDFSLATVKSRW

SEQ ID NO: 431 - protein, 40 aa, Artificial Sequence
  Description of Artificial Sequence: Synthetic polypeptide
AKSIIHRDLKSNNIFLHEDLTVKIGDFSLATVKSRWSGSH

SEQ ID NO: 432 - protein, 40 aa, Artificial Sequence
  Description of Artificial Sequence: Synthetic polypeptide
KSIIHRDLKSNNIFLHEDLTVKIGDFSLATVKSRWSGSHQ

SEQ ID NO: 433 - protein, 40 aa, Artificial Sequence
  Description of Artificial Sequence: Synthetic polypeptide
SIIHRDLKSNNIFLHEDLTVKIGDFSLATVKSRWSGSHQF

SEQ ID NO: 434 - protein, 40 aa, Artificial Sequence
  Description of Artificial Sequence: Synthetic polypeptide
IIHRDLKSNNIFLHEDLTVKIGDFSLATVKSRWSGSHQFE

SEQ ID NO: 435 - protein, 40 aa, Artificial Sequence
  Description of Artificial Sequence: Synthetic polypeptide
IHRDLKSNNIFLHEDLTVKIGDFSLATVKSRWSGSHQFEQ

SEQ ID NO: 436 - protein, 40 aa, Artificial Sequence
  Description of Artificial Sequence: Synthetic polypeptide
HRDLKSNNIFLHEDLTVKIGDFSLATVKSRWSGSHQFEQL

SEQ ID NO: 437 - protein, 40 aa, Artificial Sequence
  Description of Artificial Sequence: Synthetic polypeptide
RDLKSNNIFLHEDLTVKIGDFSLATVKSRWSGSHQFEQLS

SEQ ID NO: 438 - protein, 40 aa, Artificial Sequence
  Description of Artificial Sequence: Synthetic polypeptide
KSNNIFLHEDLTVKIGDFSLATVKSRWSGSHQFEQLSGSI

SEQ ID NO: 439 - protein, 40 aa, Artificial Sequence
  Description of Artificial Sequence: Synthetic polypeptide
SNNIFLHEDLTVKIGDFSLATVKSRWSGSHQFEQLSGSIL

SEQ ID NO: 440 - protein, 40 aa, Artificial Sequence
  Description of Artificial Sequence: Synthetic polypeptide
NNIFLHEDLTVKIGDFSLATVKSRWSGSHQFEQLSGSILW

SEQ ID NO: 441 - protein, 40 aa, Artificial Sequence
  Description of Artificial Sequence: Synthetic polypeptide
FLHEDLTVKIGDFSLATVKSRWSGSHQFEQLSGSILWMAP

SEQ ID NO: 442 - protein, 40 aa, Artificial Sequence
  Description of Artificial Sequence: Synthetic polypeptide
QTAQGMDYLHAKSIIHRDLKSNNIFLHEDLTVKIGDFGQA

SEQ ID NO: 443 - protein, 40 aa, Artificial Sequence
  Description of Artificial Sequence: Synthetic polypeptide
TAQGMDYLHAKSIIHRDLKSNNIFLHEDLTVKIGDFGQAT

SEQ ID NO: 444 - protein, 40 aa, Artificial Sequence
  Description of Artificial Sequence: Synthetic polypeptide
MDYLHAKSIIHRDLKSNNIFLHEDLTVKIGDFGQATVKSR

SEQ ID NO: 445 - protein, 40 aa, Artificial Sequence
  Description of Artificial Sequence: Synthetic polypeptide
DYLHAKSIIHRDLKSNNIFLHEDLTVKIGDFGQATVKSRW

SEQ ID NO: 446 - protein, 40 aa, Artificial Sequence
  Description of Artificial Sequence: Synthetic polypeptide
AKSIIHRDLKSNNIFLHEDLTVKIGDFGQATVKSRWSGSH

SEQ ID NO: 447 - protein, 40 aa, Artificial Sequence
  Description of Artificial Sequence: Synthetic polypeptide
KSIIHRDLKSNNIFLHEDLTVKIGDFGQATVKSRWSGSHQ

SEQ ID NO: 448 - protein, 40 aa, Artificial Sequence
  Description of Artificial Sequence: Synthetic polypeptide
SIIHRDLKSNNIFLHEDLTVKIGDFGQATVKSRWSGSHQF

SEQ ID NO: 449 - protein, 40 aa, Artificial Sequence
  Description of Artificial Sequence: Synthetic polypeptide
IIHRDLKSNNIFLHEDLTVKIGDFGQATVKSRWSGSHQFE

SEQ ID NO: 450 - protein, 40 aa, Artificial Sequence
  Description of Artificial Sequence: Synthetic polypeptide
IHRDLKSNNIFLHEDLTVKIGDFGQATVKSRWSGSHQFEQ

SEQ ID NO: 451 - protein, 40 aa, Artificial Sequence
  Description of Artificial Sequence: Synthetic polypeptide
RDLKSNNIFLHEDLTVKIGDFGQATVKSRWSGSHQFEQLS

SEQ ID NO: 452 - protein, 40 aa, Artificial Sequence
  Description of Artificial Sequence: Synthetic polypeptide
DLKSNNIFLHEDLTVKIGDFGQATVKSRWSGSHQFEQLSG

SEQ ID NO: 453 - protein, 40 aa, Artificial Sequence
  Description of Artificial Sequence: Synthetic polypeptide
KSNNIFLHEDLTVKIGDFGQATVKSRWSGSHQFEQLSGSI

SEQ ID NO: 454 - protein, 40 aa, Artificial Sequence
  Description of Artificial Sequence: Synthetic polypeptide
SNNIFLHEDLTVKIGDFGQATVKSRWSGSHQFEQLSGSIL

SEQ ID NO: 455 - protein, 40 aa, Artificial Sequence
  Description of Artificial Sequence: Synthetic polypeptide
NNIFLHEDLTVKIGDFGQATVKSRWSGSHQFEQLSGSILW

SEQ ID NO: 456 - protein, 40 aa, Artificial Sequence
  Description of Artificial Sequence: Synthetic polypeptide
FLHEDLTVKIGDFGQATVKSRWSGSHQFEQLSGSILWMAP

SEQ ID NO: 457 - protein, 40 aa, Artificial Sequence
  Description of Artificial Sequence: Synthetic polypeptide
IGDFGQATVKSRWSGSHQFEQLSGSILWMAPEVIRMQDKN

SEQ ID NO: 458 - protein, 40 aa, Artificial Sequence
  Description of Artificial Sequence: Synthetic polypeptide
TAQGMDYLHAKSIIHRDLKSNNIFLHEDLTVKIGDFGVAT

SEQ ID NO: 459 - protein, 40 aa, Artificial Sequence
  Description of Artificial Sequence: Synthetic polypeptide
AQGMDYLHAKSIIHRDLKSNNIFLHEDLTVKIGDFGVATV

SEQ ID NO: 460 - protein, 40 aa, Artificial Sequence
  Description of Artificial Sequence: Synthetic polypeptide
QGMDYLHAKSIIHRDLKSNNIFLHEDLTVKIGDFGVATVK

SEQ ID NO: 461 - protein, 40 aa, Artificial Sequence
  Description of Artificial Sequence: Synthetic polypeptide
GMDYLHAKSIIHRDLKSNNIFLHEDLTVKIGDFGVATVKS

SEQ ID NO: 462 - protein, 40 aa, Artificial Sequence
  Description of Artificial Sequence: Synthetic polypeptide
MDYLHAKSIIHRDLKSNNIFLHEDLTVKIGDFGVATVKSR

SEQ ID NO: 463 - protein, 40 aa, Artificial Sequence
  Description of Artificial Sequence: Synthetic polypeptide
DYLHAKSIIHRDLKSNNIFLHEDLTVKIGDFGVATVKSRW

SEQ ID NO: 464 - protein, 40 aa, Artificial Sequence
  Description of Artificial Sequence: Synthetic polypeptide
AKSIIHRDLKSNNIFLHEDLTVKIGDFGVATVKSRWSGSH

SEQ ID NO: 465 - protein, 40 aa, Artificial Sequence
  Description of Artificial Sequence: Synthetic polypeptide
KSIIHRDLKSNNIFLHEDLTVKIGDFGVATVKSRWSGSHQ

SEQ ID NO: 466 - protein, 40 aa, Artificial Sequence
  Description of Artificial Sequence: Synthetic polypeptide
SIIHRDLKSNNIFLHEDLTVKIGDFGVATVKSRWSGSHQF

SEQ ID NO: 467 - protein, 40 aa, Artificial Sequence
  Description of Artificial Sequence: Synthetic polypeptide
IIHRDLKSNNIFLHEDLTVKIGDFGVATVKSRWSGSHQFE

SEQ ID NO: 468 - protein, 40 aa, Artificial Sequence
  Description of Artificial Sequence: Synthetic polypeptide
IHRDLKSNNIFLHEDLTVKIGDFGVATVKSRWSGSHQFEQ

SEQ ID NO: 469 - protein, 40 aa, Artificial Sequence
  Description of Artificial Sequence: Synthetic polypeptide
HRDLKSNNIFLHEDLTVKIGDFGVATVKSRWSGSHQFEQL

SEQ ID NO: 470 - protein, 40 aa, Artificial Sequence
  Description of Artificial Sequence: Synthetic polypeptide
RDLKSNNIFLHEDLTVKIGDFGVATVKSRWSGSHQFEQLS

SEQ ID NO: 471 - protein, 40 aa, Artificial Sequence
  Description of Artificial Sequence: Synthetic polypeptide
SNNIFLHEDLTVKIGDFGVATVKSRWSGSHQFEQLSGSIL

SEQ ID NO: 472 - protein, 40 aa, Artificial Sequence
  Description of Artificial Sequence: Synthetic polypeptide
NNIFLHEDLTVKIGDFGVATVKSRWSGSHQFEQLSGSILW

SEQ ID NO: 473 - protein, 40 aa, Artificial Sequence
  Description of Artificial Sequence: Synthetic polypeptide
TVKIGDFGVATVKSRWSGSHQFEQLSGSILWMAPEVIRMQ

SEQ ID NO: 474 - protein, 40 aa, Artificial Sequence
  Description of Artificial Sequence: Synthetic polypeptide
QGMDYLHAKSIIHRDLKSNNIFLHEDLTVKIGDFGLATEK

SEQ ID NO: 475 - protein, 40 aa, Artificial Sequence
  Description of Artificial Sequence: Synthetic polypeptide
DYLHAKSIIHRDLKSNNIFLHEDLTVKIGDFGLATEKSRW

SEQ ID NO: 476 - protein, 40 aa, Artificial Sequence
  Description of Artificial Sequence: Synthetic polypeptide
YLHAKSIIHRDLKSNNIFLHEDLTVKIGDFGLATEKSRWS

SEQ ID NO: 477 - protein, 40 aa, Artificial Sequence
  Description of Artificial Sequence: Synthetic polypeptide
LHAKSIIHRDLKSNNIFLHEDLTVKIGDFGLATEKSRWSG

SEQ ID NO: 478 - protein, 40 aa, Artificial Sequence
  Description of Artificial Sequence: Synthetic polypeptide
AKSIIHRDLKSNNIFLHEDLTVKIGDFGLATEKSRWSGSH

SEQ ID NO: 479 - protein, 40 aa, Artificial Sequence
  Description of Artificial Sequence: Synthetic polypeptide
KSIIHRDLKSNNIFLHEDLTVKIGDFGLATEKSRWSGSHQ

SEQ ID NO: 480 - protein, 40 aa, Artificial Sequence
  Description of Artificial Sequence: Synthetic polypeptide
SIIHRDLKSNNIFLHEDLTVKIGDFGLATEKSRWSGSHQF

SEQ ID NO: 481 - protein, 40 aa, Artificial Sequence
  Description of Artificial Sequence: Synthetic polypeptide
IIHRDLKSNNIFLHEDLTVKIGDFGLATEKSRWSGSHQFE

SEQ ID NO: 482 - protein, 40 aa, Artificial Sequence
  Description of Artificial Sequence: Synthetic polypeptide
IHRDLKSNNIFLHEDLTVKIGDFGLATEKSRWSGSHQFEQ

SEQ ID NO: 483 - protein, 40 aa, Artificial Sequence
  Description of Artificial Sequence: Synthetic polypeptide
HRDLKSNNIFLHEDLTVKIGDFGLATEKSRWSGSHQFEQL

SEQ ID NO: 484 - protein, 40 aa, Artificial Sequence
  Description of Artificial Sequence: Synthetic polypeptide
RDLKSNNIFLHEDLTVKIGDFGLATEKSRWSGSHQFEQLS

SEQ ID NO: 485 - protein, 40 aa, Artificial Sequence
  Description of Artificial Sequence: Synthetic polypeptide
LKSNNIFLHEDLTVKIGDFGLATEKSRWSGSHQFEQLSGS

SEQ ID NO: 486 - protein, 40 aa, Artificial Sequence
  Description of Artificial Sequence: Synthetic polypeptide
KSNNIFLHEDLTVKIGDFGLATEKSRWSGSHQFEQLSGSI

SEQ ID NO: 487 - protein, 40 aa, Artificial Sequence
  Description of Artificial Sequence: Synthetic polypeptide
SNNIFLHEDLTVKIGDFGLATEKSRWSGSHQFEQLSGSIL

SEQ ID NO: 488 - protein, 40 aa, Artificial Sequence
  Description of Artificial Sequence: Synthetic polypeptide
NNIFLHEDLTVKIGDFGLATEKSRWSGSHQFEQLSGSILW

SEQ ID NO: 489 - protein, 40 aa, Artificial Sequence
  Description of Artificial Sequence: Synthetic polypeptide
TEKSRWSGSHQFEQLSGSILWMAPEVIRMQDKNPYSFQSD

SEQ ID NO: 490 - protein, 40 aa, Artificial Sequence
  Description of Artificial Sequence: Synthetic polypeptide
EAPIYELTSQFTGLKCPSLAGKPKVFFIQACQGDNYQKGI

SEQ ID NO: 491 - protein, 40 aa, Artificial Sequence
  Description of Artificial Sequence: Synthetic polypeptide
KCPSLAGKPKVFFIQACQGDNYQKGIPVETDSEEQPYLEM

SEQ ID NO: 492 - protein, 40 aa, Artificial Sequence
  Description of Artificial Sequence: Synthetic polypeptide
QACQGDNYQKGIPVETDSEEQPYLEMDLSSPQTRYIPDEA

SEQ ID NO: 493 - protein, 40 aa, Artificial Sequence
  Description of Artificial Sequence: Synthetic polypeptide
EAPIYELTSQFTGLKCPSLAGKPKVFFIQACQGDNYQGGI

SEQ ID NO: 494 - protein, 40 aa, Artificial Sequence
  Description of Artificial Sequence: Synthetic polypeptide
LTSQFTGLKCPSLAGKPKVFFIQACQGDNYQGGIPVETDS

SEQ ID NO: 495 - protein, 40 aa, Artificial Sequence
  Description of Artificial Sequence: Synthetic polypeptide
LAGKPKVFFIQACQGDNYQGGIPVETDSEEQPYLEMDLSS

SEQ ID NO: 496 - protein, 40 aa, Artificial Sequence
  Description of Artificial Sequence: Synthetic polypeptide
GKPKVFFIQACQGDNYQGGIPVETDSEEQPYLEMDLSSPQ

SEQ ID NO: 497 - protein, 40 aa, Artificial Sequence
  Description of Artificial Sequence: Synthetic polypeptide
PKVFFIQACQGDNYQGGIPVETDSEEQPYLEMDLSSPQTR

SEQ ID NO: 498 - protein, 40 aa, Artificial Sequence
  Description of Artificial Sequence: Synthetic polypeptide
CQGDNYQGGIPVETDSEEQPYLEMDLSSPQTRYIPDEADF

SEQ ID NO: 499 - protein, 40 aa, Artificial Sequence
  Description of Artificial Sequence: Synthetic polypeptide
PLDGERIATYTLFSHAVSSNGNAVEDPMEILITVTDQNDN

SEQ ID NO: 500 - protein, 40 aa, Artificial Sequence
  Description of Artificial Sequence: Synthetic polypeptide
EPLDRERIATYTLFSHAVSSNGNAVEDPMEILITVTDQNG

SEQ ID NO: 501 - protein, 40 aa, Artificial Sequence
  Description of Artificial Sequence: Synthetic polypeptide
DRERIATYTLFSHAVSSNGNAVEDPMEILITVTDQNGNKP

SEQ ID NO: 502 - protein, 40 aa, Artificial Sequence
  Description of Artificial Sequence: Synthetic polypeptide
IATYTLFSHAVSSNGNAVEDPMEILITVTDQNGNKPEFTQ

SEQ ID NO: 503 - protein, 40 aa, Artificial Sequence
  Description of Artificial Sequence: Synthetic polypeptide
TYTLFSHAVSSNGNAVEDPMEILITVTDQNGNKPEFTQEV

SEQ ID NO: 504 - protein, 40 aa, Artificial Sequence
  Description of Artificial Sequence: Synthetic polypeptide
VSSNGNAVEDPMEILITVTDQNGNKPEFTQEVFKGSVMEG

SEQ ID NO: 505 - protein, 40 aa, Artificial Sequence
  Description of Artificial Sequence: Synthetic polypeptide
GNAVEDPMEILITVTDQNGNKPEFTQEVFKGSVMEGALPG

SEQ ID NO: 506 - protein, 40 aa, Artificial Sequence
  Description of Artificial Sequence: Synthetic polypeptide
AVEDPMEILITVTDQNGNKPEFTQEVFKGSVMEGALPGTS

SEQ ID NO: 507 - protein, 40 aa, Artificial Sequence
  Description of Artificial Sequence: Synthetic polypeptide
ITVTDQNGNKPEFTQEVFKGSVMEGALPGTSVMEVTATDA

SEQ ID NO: 508 - protein, 40 aa, Artificial Sequence
  Description of Artificial Sequence: Synthetic polypeptide
DRERIATYTLFSHAVSSNGNAVEDPMEILITVTDQNNNKP

SEQ ID NO: 509 - protein, 40 aa, Artificial Sequence
  Description of Artificial Sequence: Synthetic polypeptide
ERIATYTLFSHAVSSNGNAVEDPMEILITVTDQNNNKPEF

SEQ ID NO: 510 - protein, 40 aa, Artificial Sequence
  Description of Artificial Sequence: Synthetic polypeptide
TLFSHAVSSNGNAVEDPMEILITVTDQNNNKPEFTQEVFK

SEQ ID NO: 511 - protein, 40 aa, Artificial Sequence
  Description of Artificial Sequence: Synthetic polypeptide
SHAVSSNGNAVEDPMEILITVTDQNNNKPEFTQEVFKGSV

SEQ ID NO: 512 - protein, 40 aa, Artificial Sequence
  Description of Artificial Sequence: Synthetic polypeptide
DQNNNKPEFTQEVFKGSVMEGALPGTSVMEVTATDADDDV

SEQ ID NO: 513 - protein, 40 aa, Artificial Sequence
  Description of Artificial Sequence: Synthetic polypeptide
TVTDQNDNKPEFTQEVFKGSVMEGALPGTSVMEVTATDAG

SEQ ID NO: 514 - protein, 40 aa, Artificial Sequence
  Description of Artificial Sequence: Synthetic polypeptide
FTQEVFKGSVMEGALPGTSVMEVTATDAGDDVNTYNAAIA

SEQ ID NO: 515 - protein, 40 aa, Artificial Sequence
  Description of Artificial Sequence: Synthetic polypeptide
RLPVDLTEELGHRDVARYLRAAAGGTRGSNHARIDAAEGP

SEQ ID NO: 516 - protein, 40 aa, Artificial Sequence
  Description of Artificial Sequence: Synthetic polypeptide
RRPIQVMMMGSARVAELLLLHGAEPNCADPATLTRPVHYA

SEQ ID NO: 517 - protein, 40 aa, Artificial Sequence
  Description of Artificial Sequence: Synthetic polypeptide
LLHGAEPNCADPATLTRPVHYAAREGFLDTLVVLHRAGAR

SEQ ID NO: 518 - protein, 40 aa, Artificial Sequence
  Description of Artificial Sequence: Synthetic polypeptide
SQEEDCLIKITDFGHSKILGETSLRRTLCGTPTYLAPEVL

SEQ ID NO: 519 - protein, 40 aa, Artificial Sequence
  Description of Artificial Sequence: Synthetic polypeptide
EEDCLIKITDFGHSKILGETSLRRTLCGTPTYLAPEVLVS

SEQ ID NO: 520 - protein, 40 aa, Artificial Sequence
  Description of Artificial Sequence: Synthetic polypeptide
EDCLIKITDFGHSKILGETSLRRTLCGTPTYLAPEVLVSV

SEQ ID NO: 521 - protein, 40 aa, Artificial Sequence
  Description of Artificial Sequence: Synthetic polypeptide
IKITDFGHSKILGETSLRRTLCGTPTYLAPEVLVSVGTAG

SEQ ID NO: 522 - protein, 40 aa, Artificial Sequence
  Description of Artificial Sequence: Synthetic polypeptide
LRRTLCGTPTYLAPEVLVSVGTAGYNRAVDCWSLGVILFI

SEQ ID NO: 523 - protein, 40 aa, Artificial Sequence
  Description of Artificial Sequence: Synthetic polypeptide
RRTLCGTPTYLAPEVLVSVGTAGYNRAVDCWSLGVILFIC

SEQ ID NO: 524 - protein, 40 aa, Artificial Sequence
  Description of Artificial Sequence: Synthetic polypeptide
LSSQEEDCLIKITDFGHSKILGETSLMRTLCGTLTYLAPE

SEQ ID NO: 525 - protein, 40 aa, Artificial Sequence
  Description of Artificial Sequence: Synthetic polypeptide
EEDCLIKITDFGHSKILGETSLMRTLCGTLTYLAPEVLVS

SEQ ID NO: 526 - protein, 40 aa, Artificial Sequence
  Description of Artificial Sequence: Synthetic polypeptide
EDCLIKITDFGHSKILGETSLMRTLCGTLTYLAPEVLVSV

SEQ ID NO: 527 - protein, 40 aa, Artificial Sequence
  Description of Artificial Sequence: Synthetic polypeptide
DCLIKITDFGHSKILGETSLMRTLCGTLTYLAPEVLVSVG

SEQ ID NO: 528 - protein, 40 aa, Artificial Sequence
  Description of Artificial Sequence: Synthetic polypeptide
CLIKITDFGHSKILGETSLMRTLCGTLTYLAPEVLVSVGT

SEQ ID NO: 529 - protein, 40 aa, Artificial Sequence
  Description of Artificial Sequence: Synthetic polypeptide
LIKITDFGHSKILGETSLMRTLCGTLTYLAPEVLVSVGTA

SEQ ID NO: 530 - protein, 40 aa, Artificial Sequence
  Description of Artificial Sequence: Synthetic polypeptide
ITDFGHSKILGETSLMRTLCGTLTYLAPEVLVSVGTAGYN

SEQ ID NO: 531 - protein, 40 aa, Artificial Sequence
  Description of Artificial Sequence: Synthetic polypeptide
DFGHSKILGETSLMRTLCGTLTYLAPEVLVSVGTAGYNRA

SEQ ID NO: 532 - protein, 40 aa, Artificial Sequence
  Description of Artificial Sequence: Synthetic polypeptide
TSLMRTLCGTLTYLAPEVLVSVGTAGYNRAVDCWSLGVIL

SEQ ID NO: 533 - protein, 40 aa, Artificial Sequence
  Description of Artificial Sequence: Synthetic polypeptide
LMRTLCGTLTYLAPEVLVSVGTAGYNRAVDCWSLGVILFI

SEQ ID NO: 534 - protein, 40 aa, Artificial Sequence
  Description of Artificial Sequence: Synthetic polypeptide
MRTLCGTLTYLAPEVLVSVGTAGYNRAVDCWSLGVILFIC

SEQ ID NO: 535 - protein, 40 aa, Artificial Sequence
  Description of Artificial Sequence: Synthetic polypeptide
TLCGTLTYLAPEVLVSVGTAGYNRAVDCWSLGVILFICLS

SEQ ID NO: 536 - protein, 40 aa, Artificial Sequence
  Description of Artificial Sequence: Synthetic polypeptide
LCGTLTYLAPEVLVSVGTAGYNRAVDCWSLGVILFICLSG

SEQ ID NO: 537 - protein, 40 aa, Artificial Sequence
  Description of Artificial Sequence: Synthetic polypeptide
GTLTYLAPEVLVSVGTAGYNRAVDCWSLGVILFICLSGYP

SEQ ID NO: 538 - protein, 40 aa, Artificial Sequence
  Description of Artificial Sequence: Synthetic polypeptide
LTYLAPEVLVSVGTAGYNRAVDCWSLGVILFICLSGYPPF

SEQ ID NO: 539 - protein, 40 aa, Artificial Sequence
  Description of Artificial Sequence: Synthetic polypeptide
SQEEDCLIKITDFGHSKILGETSLMRTLCGTYTYLAPEVL

SEQ ID NO: 540 - protein, 40 aa, Artificial Sequence
  Description of Artificial Sequence: Synthetic polypeptide
QEEDCLIKITDFGHSKILGETSLMRTLCGTYTYLAPEVLV

SEQ ID NO: 541 - protein, 40 aa, Artificial Sequence
  Description of Artificial Sequence: Synthetic polypeptide
EEDCLIKITDFGHSKILGETSLMRTLCGTYTYLAPEVLVS

SEQ ID NO: 542 - protein, 40 aa, Artificial Sequence
  Description of Artificial Sequence: Synthetic polypeptide
EDCLIKITDFGHSKILGETSLMRTLCGTYTYLAPEVLVSV

SEQ ID NO: 543 - protein, 40 aa, Artificial Sequence
  Description of Artificial Sequence: Synthetic polypeptide
CLIKITDFGHSKILGETSLMRTLCGTYTYLAPEVLVSVGT

SEQ ID NO: 544 - protein, 40 aa, Artificial Sequence
  Description of Artificial Sequence: Synthetic polypeptide
DFGHSKILGETSLMRTLCGTYTYLAPEVLVSVGTAGYNRA

SEQ ID NO: 545 - protein, 40 aa, Artificial Sequence
  Description of Artificial Sequence: Synthetic polypeptide
SLMRTLCGTYTYLAPEVLVSVGTAGYNRAVDCWSLGVILF

SEQ ID NO: 546 - protein, 40 aa, Artificial Sequence
  Description of Artificial Sequence: Synthetic polypeptide
LMRTLCGTYTYLAPEVLVSVGTAGYNRAVDCWSLGVILFI

SEQ ID NO: 547 - protein, 40 aa, Artificial Sequence
  Description of Artificial Sequence: Synthetic polypeptide
RTLCGTYTYLAPEVLVSVGTAGYNRAVDCWSLGVILFICL

SEQ ID NO: 548 - protein, 40 aa, Artificial Sequence
  Description of Artificial Sequence: Synthetic polypeptide
TLCGTYTYLAPEVLVSVGTAGYNRAVDCWSLGVILFICLS

SEQ ID NO: 549 - protein, 40 aa, Artificial Sequence
  Description of Artificial Sequence: Synthetic polypeptide
LCGTYTYLAPEVLVSVGTAGYNRAVDCWSLGVILFICLSG

SEQ ID NO: 550 - protein, 40 aa, Artificial Sequence
  Description of Artificial Sequence: Synthetic polypeptide
GTYTYLAPEVLVSVGTAGYNRAVDCWSLGVILFICLSGYP

SEQ ID NO: 551 - protein, 40 aa, Artificial Sequence
  Description of Artificial Sequence: Synthetic polypeptide
YTYLAPEVLVSVGTAGYNRAVDCWSLGVILFICLSGYPPF

SEQ ID NO: 552 - protein, 40 aa, Artificial Sequence
  Description of Artificial Sequence: Synthetic polypeptide
ENVLLSSQEEDCLIKITDFGHSKILGETSLMRTLCGTPHY

SEQ ID NO: 553 - protein, 40 aa, Artificial Sequence
  Description of Artificial Sequence: Synthetic polypeptide
LSSQEEDCLIKITDFGHSKILGETSLMRTLCGTPHYLAPE

SEQ ID NO: 554 - protein, 40 aa, Artificial Sequence
  Description of Artificial Sequence: Synthetic polypeptide
SQEEDCLIKITDFGHSKILGETSLMRTLCGTPHYLAPEVL

SEQ ID NO: 555 - protein, 40 aa, Artificial Sequence
  Description of Artificial Sequence: Synthetic polypeptide
QEEDCLIKITDFGHSKILGETSLMRTLCGTPHYLAPEVLV

SEQ ID NO: 556 - protein, 40 aa, Artificial Sequence
  Description of Artificial Sequence: Synthetic polypeptide
EEDCLIKITDFGHSKILGETSLMRTLCGTPHYLAPEVLVS

SEQ ID NO: 557 - protein, 40 aa, Artificial Sequence
  Description of Artificial Sequence: Synthetic polypeptide
EDCLIKITDFGHSKILGETSLMRTLCGTPHYLAPEVLVSV

SEQ ID NO: 558 - protein, 40 aa, Artificial Sequence
  Description of Artificial Sequence: Synthetic polypeptide
DCLIKITDFGHSKILGETSLMRTLCGTPHYLAPEVLVSVG

SEQ ID NO: 559 - protein, 40 aa, Artificial Sequence
  Description of Artificial Sequence: Synthetic polypeptide
CLIKITDFGHSKILGETSLMRTLCGTPHYLAPEVLVSVGT

SEQ ID NO: 560 - protein, 40 aa, Artificial Sequence
  Description of Artificial Sequence: Synthetic polypeptide
IKITDFGHSKILGETSLMRTLCGTPHYLAPEVLVSVGTAG

SEQ ID NO: 561 - protein, 40 aa, Artificial Sequence
  Description of Artificial Sequence: Synthetic polypeptide
TSLMRTLCGTPHYLAPEVLVSVGTAGYNRAVDCWSLGVIL

SEQ ID NO: 562 - protein, 40 aa, Artificial Sequence
  Description of Artificial Sequence: Synthetic polypeptide
SLMRTLCGTPHYLAPEVLVSVGTAGYNRAVDCWSLGVILF

SEQ ID NO: 563 - protein, 40 aa, Artificial Sequence
  Description of Artificial Sequence: Synthetic polypeptide
RTLCGTPHYLAPEVLVSVGTAGYNRAVDCWSLGVILFICL

SEQ ID NO: 564 - protein, 40 aa, Artificial Sequence
  Description of Artificial Sequence: Synthetic polypeptide
TLCGTPHYLAPEVLVSVGTAGYNRAVDCWSLGVILFICLS

SEQ ID NO: 565 - protein, 40 aa, Artificial Sequence
  Description of Artificial Sequence: Synthetic polypeptide
LCGTPHYLAPEVLVSVGTAGYNRAVDCWSLGVILFICLSG

SEQ ID NO: 566 - protein, 40 aa, Artificial Sequence
  Description of Artificial Sequence: Synthetic polypeptide
CGTPHYLAPEVLVSVGTAGYNRAVDCWSLGVILFICLSGY

SEQ ID NO: 567 - protein, 40 aa, Artificial Sequence
  Description of Artificial Sequence: Synthetic polypeptide
GTPHYLAPEVLVSVGTAGYNRAVDCWSLGVILFICLSGYP

SEQ ID NO: 568 - protein, 40 aa, Artificial Sequence
  Description of Artificial Sequence: Synthetic polypeptide
TPHYLAPEVLVSVGTAGYNRAVDCWSLGVILFICLSGYPP

SEQ ID NO: 569 - protein, 40 aa, Artificial Sequence
  Description of Artificial Sequence: Synthetic polypeptide
PHYLAPEVLVSVGTAGYNRAVDCWSLGVILFICLSGYPPF

SEQ ID NO: 570 - protein, 40 aa, Artificial Sequence
  Description of Artificial Sequence: Synthetic polypeptide
HYLAPEVLVSVGTAGYNRAVDCWSLGVILFICLSGYPPFS

SEQ ID NO: 571 - protein, 40 aa, Artificial Sequence
  Description of Artificial Sequence: Synthetic polypeptide
SLMRTLCGTPTYLAPEVLVSVGTAGYNRAVDCWSLGFILF

SEQ ID NO: 572 - protein, 40 aa, Artificial Sequence
  Description of Artificial Sequence: Synthetic polypeptide
LMRTLCGTPTYLAPEVLVSVGTAGYNRAVDCWSLGFILFI

SEQ ID NO: 573 - protein, 40 aa, Artificial Sequence
  Description of Artificial Sequence: Synthetic polypeptide
MRTLCGTPTYLAPEVLVSVGTAGYNRAVDCWSLGFILFIC

SEQ ID NO: 574 - protein, 40 aa, Artificial Sequence
  Description of Artificial Sequence: Synthetic polypeptide
TLCGTPTYLAPEVLVSVGTAGYNRAVDCWSLGFILFICLS

SEQ ID NO: 575 - protein, 40 aa, Artificial Sequence
  Description of Artificial Sequence: Synthetic polypeptide
LCGTPTYLAPEVLVSVGTAGYNRAVDCWSLGFILFICLSG

SEQ ID NO: 576 - protein, 40 aa, Artificial Sequence
  Description of Artificial Sequence: Synthetic polypeptide
CGTPTYLAPEVLVSVGTAGYNRAVDCWSLGFILFICLSGY

SEQ ID NO: 577 - protein, 40 aa, Artificial Sequence
  Description of Artificial Sequence: Synthetic polypeptide
GTPTYLAPEVLVSVGTAGYNRAVDCWSLGFILFICLSGYP

SEQ ID NO: 578 - protein, 40 aa, Artificial Sequence
  Description of Artificial Sequence: Synthetic polypeptide
PTYLAPEVLVSVGTAGYNRAVDCWSLGFILFICLSGYPPF

SEQ ID NO: 579 - protein, 40 aa, Artificial Sequence
  Description of Artificial Sequence: Synthetic polypeptide
YLAPEVLVSVGTAGYNRAVDCWSLGFILFICLSGYPPFSE

SEQ ID NO: 580 - protein, 40 aa, Artificial Sequence
  Description of Artificial Sequence: Synthetic polypeptide
LAPEVLVSVGTAGYNRAVDCWSLGFILFICLSGYPPFSEH

SEQ ID NO: 581 - protein, 40 aa, Artificial Sequence
  Description of Artificial Sequence: Synthetic polypeptide
APEVLVSVGTAGYNRAVDCWSLGFILFICLSGYPPFSEHR

SEQ ID NO: 582 - protein, 40 aa, Artificial Sequence
  Description of Artificial Sequence: Synthetic polypeptide
PEVLVSVGTAGYNRAVDCWSLGFILFICLSGYPPFSEHRT

SEQ ID NO: 583 - protein, 40 aa, Artificial Sequence
  Description of Artificial Sequence: Synthetic polypeptide
EVLVSVGTAGYNRAVDCWSLGFILFICLSGYPPFSEHRTQ

SEQ ID NO: 584 - protein, 40 aa, Artificial Sequence
  Description of Artificial Sequence: Synthetic polypeptide
LVSVGTAGYNRAVDCWSLGFILFICLSGYPPFSEHRTQVS

SEQ ID NO: 585 - protein, 40 aa, Artificial Sequence
  Description of Artificial Sequence: Synthetic polypeptide
GTAGYNRAVDCWSLGFILFICLSGYPPFSEHRTQVSLKDQ

SEQ ID NO: 586 - protein, 40 aa, Artificial Sequence
  Description of Artificial Sequence: Synthetic polypeptide
SLGFILFICLSGYPPFSEHRTQVSLKDQITSGKYNFIPEV

SEQ ID NO: 587 - protein, 40 aa, Artificial Sequence
  Description of Artificial Sequence: Synthetic polypeptide
FICLSGYPPFSEHRTQVSLKDQITSGKYNFIPEVGAEVSE

SEQ ID NO: 588 - protein, 40 aa, Artificial Sequence
  Description of Artificial Sequence: Synthetic polypeptide
EHRTQVSLKDQITSGKYNFIPEVGAEVSEKALDLVKKLLV

SEQ ID NO: 589 - protein, 40 aa, Artificial Sequence
  Description of Artificial Sequence: Synthetic polypeptide
TSGKYNFIPEVGAEVSEKALDLVKKLLVVDPKARFTTEEA

SEQ ID NO: 590 - protein, 40 aa, Artificial Sequence
  Description of Artificial Sequence: Synthetic polypeptide
YNFIPEVGAEVSEKALDLVKKLLVVDPKARFTTEEALRHP

SEQ ID NO: 591 - protein, 40 aa, Artificial Sequence
  Description of Artificial Sequence: Synthetic polypeptide
NFIPEVGAEVSEKALDLVKKLLVVDPKARFTTEEALRHPW

SEQ ID NO: 592 - protein, 40 aa, Artificial Sequence
  Description of Artificial Sequence: Synthetic polypeptide
PEVGAEVSEKALDLVKKLLVVDPKARFTTEEALRHPWLQD

SEQ ID NO: 593 - protein, 40 aa, Artificial Sequence
  Description of Artificial Sequence: Synthetic polypeptide
MATQADLMELDMAMEPDRKAAVSHWQQQSYLVSGIHSGAT

SEQ ID NO: 594 - protein, 40 aa, Artificial Sequence
  Description of Artificial Sequence: Synthetic polypeptide
QADLMELDMAMEPDRKAAVSHWQQQSYLYSGIHSGATTTA

SEQ ID NO: 595 - protein, 40 aa, Artificial Sequence
  Description of Artificial Sequence: Synthetic polypeptide
ITTDCLQILAYGNQESKLIILASGGPQALVNIMRTYTFEK

SEQ ID NO: 596 - protein, 40 aa, Artificial Sequence
  Description of Artificial Sequence: Synthetic polypeptide
TTDCLQILAYGNQESKLIILASGGPQALVNIMRTYTFEKL

SEQ ID NO: 597 - protein, 40 aa, Artificial Sequence
  Description of Artificial Sequence: Synthetic polypeptide
TDCLQILAYGNQESKLIILASGGPQALVNIMRTYTFEKLL

SEQ ID NO: 598 - protein, 40 aa, Artificial Sequence
  Description of Artificial Sequence: Synthetic polypeptide
DCLQILAYGNQESKLIILASGGPQALVNIMRTYTFEKLLW

SEQ ID NO: 599 - protein, 40 aa, Artificial Sequence
  Description of Artificial Sequence: Synthetic polypeptide
ESKLIILASGGPQALVNIMRTYTFEKLLWTTSRVLKVLSV

SEQ ID NO: 600 - protein, 40 aa, Artificial Sequence
  Description of Artificial Sequence: Synthetic polypeptide
GPQALVNIMRTYTFEKLLWTTSRVLKVLSVCSSNKPAIVE

SEQ ID NO: 601 - protein, 40 aa, Artificial Sequence
  Description of Artificial Sequence: Synthetic polypeptide
PQALVNIMRTYTFEKLLWTTSRVLKVLSVCSSNKPAIVEA

SEQ ID NO: 602 - protein, 40 aa, Artificial Sequence
  Description of Artificial Sequence: Synthetic polypeptide
TTDCLQILAYGNQESKLIILASGGPQALVNIMRTYTYKKL

SEQ ID NO: 603 - protein, 40 aa, Artificial Sequence
  Description of Artificial Sequence: Synthetic polypeptide
TDCLQILAYGNQESKLIILASGGPQALVNIMRTYTYKKLL

SEQ ID NO: 604 - protein, 40 aa, Artificial Sequence
  Description of Artificial Sequence: Synthetic polypeptide
DCLQILAYGNQESKLIILASGGPQALVNIMRTYTYKKLLW

SEQ ID NO: 605 - protein, 40 aa, Artificial Sequence
  Description of Artificial Sequence: Synthetic polypeptide
QILAYGNQESKLIILASGGPQALVNIMRTYTYKKLLWTTS

SEQ ID NO: 606 - protein, 40 aa, Artificial Sequence
  Description of Artificial Sequence: Synthetic polypeptide
ITTDCLQILAYGNQESKLIILASGGPQALVNIMRTYTYET

SEQ ID NO: 607 - protein, 40 aa, Artificial Sequence
  Description of Artificial Sequence: Synthetic polypeptide
TTDCLQILAYGNQESKLIILASGGPQALVNIMRTYTYETL

SEQ ID NO: 608 - protein, 40 aa, Artificial Sequence
  Description of Artificial Sequence: Synthetic polypeptide
LQILAYGNQESKLIILASGGPQALVNIMRTYTYETLLWTT

SEQ ID NO: 609 - protein, 40 aa, Artificial Sequence
  Description of Artificial Sequence: Synthetic polypeptide
ESKLIILASGGPQALVNIMRTYTYETLLWTTSRVLKVLSV

SEQ ID NO: 610 - protein, 40 aa, Artificial Sequence
  Description of Artificial Sequence: Synthetic polypeptide
ILASGGPQALVNIMRTYTYETLLWTTSRVLKVLSVCSSNK

SEQ ID NO: 611 - protein, 40 aa, Artificial Sequence
  Description of Artificial Sequence: Synthetic polypeptide
LASGGPQALVNIMRTYTYETLLWTTSRVLKVLSVCSSNKP

SEQ ID NO: 612 - protein, 40 aa, Artificial Sequence
  Description of Artificial Sequence: Synthetic polypeptide
QALVNIMRTYTYETLLWTTSRVLKVLSVCSSNKPAIVEAG

SEQ ID NO: 613 - protein, 40 aa, Artificial Sequence
  Description of Artificial Sequence: Synthetic polypeptide
MATQADLMELDMAMEPDRKAAVSHWQQQSYLDSRIHSGAT

SEQ ID NO: 614 - protein, 40 aa, Artificial Sequence
  Description of Artificial Sequence: Synthetic polypeptide
ATQADLMELDMAMEPDRKAAVSHWQQQSYLDSRIHSGATT

SEQ ID NO: 615 - protein, 40 aa, Artificial Sequence
  Description of Artificial Sequence: Synthetic polypeptide
HWQQQSYLDSRIHSGATTTAPSLSGKGNPEEEDVDTSQVL

SEQ ID NO: 616 - protein, 40 aa, Artificial Sequence
  Description of Artificial Sequence: Synthetic polypeptide
QQSYLDSRIHSGATTTAPSLSGKGNPEEEDVDTSQVLYEW

SEQ ID NO: 617 - protein, 40 aa, Artificial Sequence
  Description of Artificial Sequence: Synthetic polypeptide
VLSVCSSNKPAIVEAGGMQALGLHLTDPSQRLVQNCLCTL

SEQ ID NO: 618 - protein, 40 aa, Artificial Sequence
  Description of Artificial Sequence: Synthetic polypeptide
LSVCSSNKPAIVEAGGMQALGLHLTDPSQRLVQNCLCTLR

SEQ ID NO: 619 - protein, 40 aa, Artificial Sequence
  Description of Artificial Sequence: Synthetic polypeptide
LVQNCLCTLRNLSDAATKQEGMEGLLGTLVQLLGSDDINV

SEQ ID NO: 620 - protein, 40 aa, Artificial Sequence
  Description of Artificial Sequence: Synthetic polypeptide
GLHLTDPSQRLVQNCLGTLRNLSDAATKQEGMEGLLGTLV

SEQ ID NO: 621 - protein, 40 aa, Artificial Sequence
  Description of Artificial Sequence: Synthetic polypeptide
RLVQNCLGTLRNLSDAATKQEGMEGLLGTLVQLLGSDDIN

SEQ ID NO: 622 - protein, 40 aa, Artificial Sequence
  Description of Artificial Sequence: Synthetic polypeptide
SQRLVQNCLWTLGNLSDAATKQEGMEGLLGTLVQLLGSDD

SEQ ID NO: 623 - protein, 40 aa, Artificial Sequence
  Description of Artificial Sequence: Synthetic polypeptide
CSSNKPAIVEAGGMQALGLHLTDPSQRLVQNCLWTLRILS

SEQ ID NO: 624 - protein, 40 aa, Artificial Sequence
  Description of Artificial Sequence: Synthetic polypeptide
LRILSDAATKQEGMEGLLGTLVQLLGSDDINVVTCAAGIL

SEQ ID NO: 625 - protein, 40 aa, Artificial Sequence
  Description of Artificial Sequence: Synthetic polypeptide
SNKPAIVEAGGMQALGLHLTDPSQRLVQNCLWTLRKLSDA

SEQ ID NO: 626 - protein, 40 aa, Artificial Sequence
  Description of Artificial Sequence: Synthetic polypeptide
GMQALGLHLTDPSQRLVQNCLWTLRKLSDAATKQEGMEGL

SEQ ID NO: 627 - protein, 40 aa, Artificial Sequence
  Description of Artificial Sequence: Synthetic polypeptide
KLSDAATKQEGMEGLLGTLVQLLGSDDINVVTCAAGILSN

SEQ ID NO: 628 - protein, 40 aa, Artificial Sequence
  Description of Artificial Sequence: Synthetic polypeptide
QALGLHLTDPSQRLVQNCLWTLRYLSDAATKQEGMEGLLG

SEQ ID NO: 629 - protein, 40 aa, Artificial Sequence
  Description of Artificial Sequence: Synthetic polypeptide
RLVQNCLWTLRYLSDAATKQEGMEGLLGTLVQLLGSDDIN

SEQ ID NO: 630 - protein, 40 aa, Artificial Sequence
  Description of Artificial Sequence: Synthetic polypeptide
LVQNCLWTLRYLSDAATKQEGMEGLLGTLVQLLGSDDINV

SEQ ID NO: 631 - protein, 40 aa, Artificial Sequence
  Description of Artificial Sequence: Synthetic polypeptide
VQNCLWTLRYLSDAATKQEGMEGLLGTLVQLLGSDDINVV

SEQ ID NO: 632 - protein, 40 aa, Artificial Sequence
  Description of Artificial Sequence: Synthetic polypeptide
SDAATKQEGMEGLLGTLVQLLGSDDINVVTCAAGILSDLT

SEQ ID NO: 633 - protein, 40 aa, Artificial Sequence
  Description of Artificial Sequence: Synthetic polypeptide
TKQEGMEGLLGTLVQLLGSDDINVVTCAAGILSDLTCNNY

SEQ ID NO: 634 - protein, 40 aa, Artificial Sequence
  Description of Artificial Sequence: Synthetic polypeptide
GLLGTLVQLLGSDDINVVTCAAGILSDLTCNNYKNKMMVC

SEQ ID NO: 635 - protein, 40 aa, Artificial Sequence
  Description of Artificial Sequence: Synthetic polypeptide
LLGTLVQLLGSDDINVVTCAAGILSDLTCNNYKNKMMVCQ

SEQ ID NO: 636 - protein, 40 aa, Artificial Sequence
  Description of Artificial Sequence: Synthetic polypeptide
LLGSDDINVVTCAAGILSDLTCNNYKNKMMVCQVGGIEAL

SEQ ID NO: 637 - protein, 40 aa, Artificial Sequence
  Description of Artificial Sequence: Synthetic polypeptide
SPILVATAVAARGLDISNVKHVINFDLPSDIEEYVHCIGR

SEQ ID NO: 638 - protein, 40 aa, Artificial Sequence
  Description of Artificial Sequence: Synthetic polypeptide
DISNVKHVINFDLPSDIEEYVHCIGRTGRVGNLGLATSFF

SEQ ID NO: 639 - protein, 40 aa, Artificial Sequence
  Description of Artificial Sequence: Synthetic polypeptide
KHVINFDLPSDIEEYVHCIGRTGRVGNLGLATSFFNERNI

SEQ ID NO: 640 - protein, 40 aa, Artificial Sequence
  Description of Artificial Sequence: Synthetic polypeptide
LPSDIEEYVHCIGRTGRVGNLGLATSFFNERNINITKDLL

SEQ ID NO: 641 - protein, 40 aa, Artificial Sequence
  Description of Artificial Sequence: Synthetic polypeptide
HCIGRTGRVGNLGLATSFFNERNINITKDLLDLLVEAKQE

SEQ ID NO: 642 - protein, 40 aa, Artificial Sequence
  Description of Artificial Sequence: Synthetic polypeptide
NFDLPSDIEEYVHRIGRAGRVGNLGLATSFFNERNINITK

SEQ ID NO: 643 - protein, 40 aa, Artificial Sequence
  Description of Artificial Sequence: Synthetic polypeptide
RAGRVGNLGLATSFFNERNINITKDLLDLLVEAKQEVPSW

SEQ ID NO: 644 - protein, 40 aa, Artificial Sequence
  Description of Artificial Sequence: Synthetic polypeptide
SNVKHVINFDLPSDIEEYVHRIGRMGRVGNLGLATSFFNE

SEQ ID NO: 645 - protein, 40 aa, Artificial Sequence
  Description of Artificial Sequence: Synthetic polypeptide
IEEYVHRIGRMGRVGNLGLATSFFNERNINITKDLLDLLV

SEQ ID NO: 646 - protein, 40 aa, Artificial Sequence
  Description of Artificial Sequence: Synthetic polypeptide
GFENFEKKINYRFKNKAYLLQAFTHASYHYNTITDCYQSL

SEQ ID NO: 647 - protein, 40 aa, Artificial Sequence
  Description of Artificial Sequence: Synthetic polypeptide
ENFEKKINYRFKNKAYLLQAFTHASYHYNTITDCYQSLEF

SEQ ID NO: 648 - protein, 40 aa, Artificial Sequence
  Description of Artificial Sequence: Synthetic polypeptide
NFEKKINYRFKNKAYLLQAFTHASYHYNTITDCYQSLEFL

SEQ ID NO: 649 - protein, 40 aa, Artificial Sequence
  Description of Artificial Sequence: Synthetic polypeptide
LLQAFTHASYHYNTITDCYQRLKFLGDAILDYLITKHLYE

SEQ ID NO: 650 - protein, 40 aa, Artificial Sequence
  Description of Artificial Sequence: Synthetic polypeptide
IDDFVQFQLEKNEMQGMDSELRRSEEDEEKEEDIEVPNAM

SEQ ID NO: 651 - protein, 40 aa, Artificial Sequence
  Description of Artificial Sequence: Synthetic polypeptide
DDFVQFQLEKNEMQGMDSELRRSEEDEEKEEDIEVPNAMG

SEQ ID NO: 652 - protein, 40 aa, Artificial Sequence
  Description of Artificial Sequence: Synthetic polypeptide
VQFQLEKNEMQGMDSELRRSEEDEEKEEDIEVPNAMGDIF

SEQ ID NO: 653 - protein, 40 aa, Artificial Sequence
  Description of Artificial Sequence: Synthetic polypeptide
FQLEKNEMQGMDSELRRSEEDEEKEEDIEVPNAMGDIFES

SEQ ID NO: 654 - protein, 40 aa, Artificial Sequence
  Description of Artificial Sequence: Synthetic polypeptide
RSEEDEEKEEDIEVPNAMGDIFESLAGAIYMDSGMSLETV

SEQ ID NO: 655 - protein, 40 aa, Artificial Sequence
  Description of Artificial Sequence: Synthetic polypeptide
DEEKEEDIEVPNAMGDIFESLAGAIYMDSGMSLETVWQVY

SEQ ID NO: 656 - protein, 40 aa, Artificial Sequence
  Description of Artificial Sequence: Synthetic polypeptide
NAMGDIFESLAGAIYMDSGMSLETVWQVYYPMMRPLIEKF

SEQ ID NO: 657 - protein, 40 aa, Artificial Sequence
  Description of Artificial Sequence: Synthetic polypeptide
FVQFQLEKNEMQGMDSELRRSEEDEEKEEDIEVPKAMRDI

SEQ ID NO: 658 - protein, 40 aa, Artificial Sequence
  Description of Artificial Sequence: Synthetic polypeptide
ELRRSEEDEEKEEDIEVPKAMRDIFESLAGAIYMDSGMSL

SEQ ID NO: 659 - protein, 40 aa, Artificial Sequence
  Description of Artificial Sequence: Synthetic polypeptide
AMRDIFESLAGAIYMDSGMSLETVWQVYYPMMRPLIEKFS

SEQ ID NO: 660 - protein, 40 aa, Artificial Sequence
  Description of Artificial Sequence: Synthetic polypeptide
VQFQLEKNEMQGMDSELRRSEEDEEKEEDIEVPKAMGYIF

SEQ ID NO: 661 - protein, 40 aa, Artificial Sequence
  Description of Artificial Sequence: Synthetic polypeptide
RSEEDEEKEEDIEVPKAMGYIFESLAGAIYMDSGMSLETV

SEQ ID NO: 662 - protein, 40 aa, Artificial Sequence
  Description of Artificial Sequence: Synthetic polypeptide
EVPKAMGYIFESLAGAIYMDSGMSLETVWQVYYPMMRPLI

SEQ ID NO: 663 - protein, 40 aa, Artificial Sequence
  Description of Artificial Sequence: Synthetic polypeptide
AMGYIFESLAGAIYMDSGMSLETVWQVYYPMMRPLIEKFS

SEQ ID NO: 664 - protein, 40 aa, Artificial Sequence
  Description of Artificial Sequence: Synthetic polypeptide
QLEKNEMQGMDSELRRSEEDEEKEEDIEVPKAMGDIFDSL

SEQ ID NO: 665 - protein, 40 aa, Artificial Sequence
  Description of Artificial Sequence: Synthetic polypeptide
LRRSEEDEEKEEDIEVPKAMGDIFDSLAGAIYMDSGMSLE

SEQ ID NO: 666 - protein, 40 aa, Artificial Sequence
  Description of Artificial Sequence: Synthetic polypeptide
RSEEDEEKEEDIEVPKAMGDIFDSLAGAIYMDSGMSLETV

SEQ ID NO: 667 - protein, 40 aa, Artificial Sequence
  Description of Artificial Sequence: Synthetic polypeptide
EDIEVPKAMGDIFDSLAGAIYMDSGMSLETVWQVYYPMMR

SEQ ID NO: 668 - protein, 40 aa, Artificial Sequence
  Description of Artificial Sequence: Synthetic polypeptide
KAMGDIFDSLAGAIYMDSGMSLETVWQVYYPMMRPLIEKF

SEQ ID NO: 669 - protein, 40 aa, Artificial Sequence
  Description of Artificial Sequence: Synthetic polypeptide
FQLEKNEMQGMDSELRRSEEDEEKEEDIEVPKAMGDIFGS

SEQ ID NO: 670 - protein, 40 aa, Artificial Sequence
  Description of Artificial Sequence: Synthetic polypeptide
SEEDEEKEEDIEVPKAMGDIFGSLAGAIYMDSGMSLETVW

SEQ ID NO: 671 - protein, 40 aa, Artificial Sequence
  Description of Artificial Sequence: Synthetic polypeptide
AMGDIFGSLAGAIYMDSGMSLETVWQVYYPMMRPLIEKFS

SEQ ID NO: 672 - protein, 40 aa, Artificial Sequence
  Description of Artificial Sequence: Synthetic polypeptide
FLKTIQEVAGYVLIALNTVERIPLENLQIIGGNMYYENSY

SEQ ID NO: 673 - protein, 40 aa, Artificial Sequence
  Description of Artificial Sequence: Synthetic polypeptide
TIQEVAGYVLIALNTVERIPLENLQIIGGNMYYENSYALA

SEQ ID NO: 674 - protein, 40 aa, Artificial Sequence
  Description of Artificial Sequence: Synthetic polypeptide
TVERIPLENLQIIGGNMYYENSYALAVLSNYDANKTGLKE

SEQ ID NO: 675 - protein, 40 aa, Artificial Sequence
  Description of Artificial Sequence: Synthetic polypeptide
AGYVLIALNTVERIPLENLQIIKGNMYYENSYALAVLSNY

SEQ ID NO: 676 - protein, 40 aa, Artificial Sequence
  Description of Artificial Sequence: Synthetic polypeptide
LNTVERIPLENLQIIKGNMYYENSYALAVLSNYDANKTGL

SEQ ID NO: 677 - protein, 40 aa, Artificial Sequence
  Description of Artificial Sequence: Synthetic polypeptide
LQIIKGNMYYENSYALAVLSNYDANKTGLKELPMRNLQEI

SEQ ID NO: 678 - protein, 40 aa, Artificial Sequence
  Description of Artificial Sequence: Synthetic polypeptide
CCHNQCAAGCTGPRESDCLVCCKFRDEATCKDTCPPLMLY

SEQ ID NO: 679 - protein, 40 aa, Artificial Sequence
  Description of Artificial Sequence: Synthetic polypeptide
GCTGPRESDCLVCCKFRDEATCKDTCPPLMLYNPTTYQMD

SEQ ID NO: 680 - protein, 40 aa, Artificial Sequence
  Description of Artificial Sequence: Synthetic polypeptide
NQCAAGCTGPRESDCLVCRKFRDEATCKDTCPPLMLCNPT

SEQ ID NO: 681 - protein, 40 aa, Artificial Sequence
  Description of Artificial Sequence: Synthetic polypeptide
PTTYQMDVNPEGKYSFGTTCVKKCPRNYVVTDHGSCVRAC

SEQ ID NO: 682 - protein, 40 aa, Artificial Sequence
  Description of Artificial Sequence: Synthetic polypeptide
VNPEGKYSFGTTCVKKCPRNYVVTDHGSCVRACGADSYEM

SEQ ID NO: 683 - protein, 40 aa, Artificial Sequence
  Description of Artificial Sequence: Synthetic polypeptide
PDNCIQCAHYIDGPHCVKTCRAGVMGENNTLVWKYADAGH

SEQ ID NO: 684 - protein, 40 aa, Artificial Sequence
  Description of Artificial Sequence: Synthetic polypeptide
PHCVKTCRAGVMGENNTLVWKYADAGHVCHLCHPNCTYGC

SEQ ID NO: 685 - protein, 40 aa, Artificial Sequence
  Description of Artificial Sequence: Synthetic polypeptide
TCTGRGPDNCIQCAHYIDGPHCVKTCSAGVMGENNTLVWK

SEQ ID NO: 686 - protein, 40 aa, Artificial Sequence
  Description of Artificial Sequence: Synthetic polypeptide
CTGRGPDNCIQCAHYIDGPHCVKTCSAGVMGENNTLVWKY

SEQ ID NO: 687 - protein, 40 aa, Artificial Sequence
  Description of Artificial Sequence: Synthetic polypeptide
AHYIDGPHCVKTCSAGVMGENNTLVWKYADAGHVCHLCHP

SEQ ID NO: 688 - protein, 40 aa, Artificial Sequence
  Description of Artificial Sequence: Synthetic polypeptide
ITCTGRGPDNCIQCAHYIDGPHCVKTCPAVVMGENNTLVW

SEQ ID NO: 689 - protein, 40 aa, Artificial Sequence
  Description of Artificial Sequence: Synthetic polypeptide
GPDNCIQCAHYIDGPHCVKTCPAVVMGENNTLVWKYADAG

SEQ ID NO: 690 - protein, 40 aa, Artificial Sequence
  Description of Artificial Sequence: Synthetic polypeptide
QCAHYIDGPHCVKTCPAVVMGENNTLVWKYADAGHVCHLC

SEQ ID NO: 691 - protein, 40 aa, Artificial Sequence
  Description of Artificial Sequence: Synthetic polypeptide
TLVWKYADAGHVCHLCHPNCTYGFTGPGLEGCPTNGPKIP

SEQ ID NO: 692 - protein, 40 aa, Artificial Sequence
  Description of Artificial Sequence: Synthetic polypeptide
DAGHVCHLCHPNCTYGFTGPGLEGCPTNGPKIPSIATGMV

SEQ ID NO: 693 - protein, 40 aa, Artificial Sequence
  Description of Artificial Sequence: Synthetic polypeptide
LKETEFKKIKVLCSGAFGTVYKGLWIPEGEKVKIPVAIKE

SEQ ID NO: 694 - protein, 40 aa, Artificial Sequence
  Description of Artificial Sequence: Synthetic polypeptide
ETEFKKIKVLCSGAFGTVYKGLWIPEGEKVKIPVAIKELR

SEQ ID NO: 695 - protein, 40 aa, Artificial Sequence
  Description of Artificial Sequence: Synthetic polypeptide
LQERELVEPLTPSGEAPNQALLRILKETEFKKIKVLDSGA

SEQ ID NO: 696 - protein, 40 aa, Artificial Sequence
  Description of Artificial Sequence: Synthetic polypeptide
EAPNQALLRILKETEFKKIKVLDSGAFGTVYKGLWIPEGE

SEQ ID NO: 697 - protein, 40 aa, Artificial Sequence
  Description of Artificial Sequence: Synthetic polypeptide
APNQALLRILKETEFKKIKVLDSGAFGTVYKGLWIPEGEK

SEQ ID NO: 698 - protein, 40 aa, Artificial Sequence
  Description of Artificial Sequence: Synthetic polypeptide
ETEFKKIKVLDSGAFGTVYKGLWIPEGEKVKIPVAIKELR

SEQ ID NO: 699 - protein, 40 aa, Artificial Sequence
  Description of Artificial Sequence: Synthetic polypeptide
TEFKKIKVLDSGAFGTVYKGLWIPEGEKVKIPVAIKELRE

SEQ ID NO: 700 - protein, 40 aa, Artificial Sequence
  Description of Artificial Sequence: Synthetic polypeptide
ERELVEPLTPSGEAPNQALLRILKETEFKKIKVLGSGAFS

SEQ ID NO: 701 - protein, 40 aa, Artificial Sequence
  Description of Artificial Sequence: Synthetic polypeptide
RELVEPLTPSGEAPNQALLRILKETEFKKIKVLGSGAFST

SEQ ID NO: 702 - protein, 40 aa, Artificial Sequence
  Description of Artificial Sequence: Synthetic polypeptide
GSGAFSTVYKGLWIPEGEKVKIPVAIKELREATSPKANKE

SEQ ID NO: 703 - protein, 40 aa, Artificial Sequence
  Description of Artificial Sequence: Synthetic polypeptide
SGAFSTVYKGLWIPEGEKVKIPVAIKELREATSPKANKEI

SEQ ID NO: 704 - protein, 40 aa, Artificial Sequence
  Description of Artificial Sequence: Synthetic polypeptide
SGAFGTVYKGLWIPEGEKVKIPVAIKELREATSPKANKEN

SEQ ID NO: 705 - protein, 40 aa, Artificial Sequence
  Description of Artificial Sequence: Synthetic polypeptide
VYKGLWIPEGEKVKIPVAIKELREATSPKANKENLDEAYV

SEQ ID NO: 706 - protein, 40 aa, Artificial Sequence
  Description of Artificial Sequence: Synthetic polypeptide
PEGEKVKIPVAIKELREATSPKANKENLDEAYVMASVDNP

SEQ ID NO: 707 - protein, 40 aa, Artificial Sequence
  Description of Artificial Sequence: Synthetic polypeptide
EKVKIPVAIKELREATSPKANKENLDEAYVMASVDNPHVC

SEQ ID NO: 708 - protein, 40 aa, Artificial Sequence
  Description of Artificial Sequence: Synthetic polypeptide
YVREHKDNIGSQYLLNWCVQIAKGMNYLEDRRLVHHDLAA

SEQ ID NO: 709 - protein, 40 aa, Artificial Sequence
  Description of Artificial Sequence: Synthetic polypeptide
MNYLEDRRLVHHDLAARNVLVKTPQHVKITDFGLAKLLGA

SEQ ID NO: 710 - protein, 40 aa, Artificial Sequence
  Description of Artificial Sequence: Synthetic polypeptide
LAARNVLVKTPQHVKITDFGRAKLLGAEEKEYHAEGGKVP

SEQ ID NO: 711 - protein, 40 aa, Artificial Sequence
  Description of Artificial Sequence: Synthetic polypeptide
VKTPQHVKITDFGRAKLLGAEEKEYHAEGGKVPIKWMALE

SEQ ID NO: 712 - protein, 40 aa, Artificial Sequence
  Description of Artificial Sequence: Synthetic polypeptide
TPQHVKITDFGRAKLLGAEEKEYHAEGGKVPIKWMALESI

SEQ ID NO: 713 - protein, 40 aa, Artificial Sequence
  Description of Artificial Sequence: Synthetic polypeptide
LSLQRMFNNCEVVLGNLEITYVQRNYDLSFLKTIQEMAGY

SEQ ID NO: 714 - protein, 40 aa, Artificial Sequence
  Description of Artificial Sequence: Synthetic polypeptide
NLEITYVQRNYDLSFLKTIQEMAGYVLIALNTVERIPLEN

SEQ ID NO: 715 - protein, 40 aa, Artificial Sequence
  Description of Artificial Sequence: Synthetic polypeptide
YDLSFLKTIQEMAGYVLIALNTVERIPLENLQIIRGNMYY

SEQ ID NO: 716 - protein, 40 aa, Artificial Sequence
  Description of Artificial Sequence: Synthetic polypeptide
FLKTIQEMAGYVLIALNTVERIPLENLQIIRGNMYYENSY

SEQ ID NO: 717 - protein, 40 aa, Artificial Sequence
  Description of Artificial Sequence: Synthetic polypeptide
KTIQEMAGYVLIALNTVERIPLENLQIIRGNMYYENSYAL

SEQ ID NO: 718 - protein, 40 aa, Artificial Sequence
  Description of Artificial Sequence: Synthetic polypeptide
EMAGYVLIALNTVERIPLENLQIIRGNMYYENSYALAVLS

SEQ ID NO: 719 - protein, 40 aa, Artificial Sequence
  Description of Artificial Sequence: Synthetic polypeptide
RNVLVKTPQHVKITDFGLAKQLGAEEKEYHAEGGKVPIKW

SEQ ID NO: 720 - protein, 40 aa, Artificial Sequence
  Description of Artificial Sequence: Synthetic polypeptide
LVKTPQHVKITDFGLAKQLGAEEKEYHAEGGKVPIKWMAL

SEQ ID NO: 721 - protein, 40 aa, Artificial Sequence
  Description of Artificial Sequence: Synthetic polypeptide
KTPQHVKITDFGLAKQLGAEEKEYHAEGGKVPIKWMALES

SEQ ID NO: 722 - protein, 40 aa, Artificial Sequence
  Description of Artificial Sequence: Synthetic polypeptide
TPQHVKITDFGLAKQLGAEEKEYHAEGGKVPIKWMALESI

SEQ ID NO: 723 - protein, 40 aa, Artificial Sequence
  Description of Artificial Sequence: Synthetic polypeptide
ITDFGLAKLLGAEEKEYHAEGGKVPIKWMALESILHRICT

SEQ ID NO: 724 - protein, 40 aa, Artificial Sequence
  Description of Artificial Sequence: Synthetic polypeptide
AKLLGAEEKEYHAEGGKVPIKWMALESILHRICTHQSDVW

SEQ ID NO: 725 - protein, 40 aa, Artificial Sequence
  Description of Artificial Sequence: Synthetic polypeptide
GKVPIKWMALESILHRICTHQSDVWSYGVTVWELMTFGSK

SEQ ID NO: 726 - protein, 40 aa, Artificial Sequence
  Description of Artificial Sequence: Synthetic polypeptide
IDGVDLCFFGMHVQEYGSDCPPPNQRRVYISYPDSVHFFR

SEQ ID NO: 727 - protein, 40 aa, Artificial Sequence
  Description of Artificial Sequence: Synthetic polypeptide
VQEYGSDCPPPNQRRVYISYLDIVHFFRPKCLRTAVYHEI

SEQ ID NO: 728 - protein, 40 aa, Artificial Sequence
  Description of Artificial Sequence: Synthetic polypeptide
DCPPPNQRRVYISYLDIVHFFRPKCLRTAVYHEILIGYLE

SEQ ID NO: 729 - protein, 40 aa, Artificial Sequence
  Description of Artificial Sequence: Synthetic polypeptide
CPPPNQRRVYISYLDIVHFFRPKCLRTAVYHEILIGYLEY

SEQ ID NO: 730 - protein, 40 aa, Artificial Sequence
  Description of Artificial Sequence: Synthetic polypeptide
YGSDCPPPNQRRVYISYLDSVHFFRPKCLRTAVCHEILIG

SEQ ID NO: 731 - protein, 40 aa, Artificial Sequence
  Description of Artificial Sequence: Synthetic polypeptide
VYISYLDSVHFFRPKCLRTAVCHEILIGYLEYVKKLGYTT

SEQ ID NO: 732 - protein, 40 aa, Artificial Sequence
  Description of Artificial Sequence: Synthetic polypeptide
SYLDSVHFFRPKCLRTAVCHEILIGYLEYVKKLGYTTGHI

SEQ ID NO: 733 - protein, 40 aa, Artificial Sequence
  Description of Artificial Sequence: Synthetic polypeptide
PPPNQRRVYISYLDSVHFFRPKCLRTAVDHEILIGYLEYV

SEQ ID NO: 734 - protein, 40 aa, Artificial Sequence
  Description of Artificial Sequence: Synthetic polypeptide
YLEYVKKLGYTTGHIWACPPSEGDDCIFHCHPPDQKIPKP

SEQ ID NO: 735 - protein, 40 aa, Artificial Sequence
  Description of Artificial Sequence: Synthetic polypeptide
EILIGYLEYVKKLGYTTGHIWACPPSEGDDYIFHCPPPDQ

SEQ ID NO: 736 - protein, 40 aa, Artificial Sequence
  Description of Artificial Sequence: Synthetic polypeptide
YVKKLGYTTGHIWACPPSEGDDYIFHCPPPDQKIPKPKRL

SEQ ID NO: 737 - protein, 40 aa, Artificial Sequence
  Description of Artificial Sequence: Synthetic polypeptide
PEGRYTFGASCVTACPYNYLSTDVGFCTLVCPLHNQEVTA

SEQ ID NO: 738 - protein, 40 aa, Artificial Sequence
  Description of Artificial Sequence: Synthetic polypeptide
STDVGFCTLVCPLHNQEVTAEDGTQRCEKCSKPCARVCYG

SEQ ID NO: 739 - protein, 40 aa, Artificial Sequence
  Description of Artificial Sequence: Synthetic polypeptide
AFGTVYKGIWIPDGENVKIPVAIKVMRENTSPKANKEILD

SEQ ID NO: 740 - protein, 40 aa, Artificial Sequence
  Description of Artificial Sequence: Synthetic polypeptide
GTVYKGIWIPDGENVKIPVAIKVMRENTSPKANKEILDEA

SEQ ID NO: 741 - protein, 40 aa, Artificial Sequence
  Description of Artificial Sequence: Synthetic polypeptide
VYKGIWIPDGENVKIPVAIKVMRENTSPKANKEILDEAYV

SEQ ID NO: 742 - protein, 40 aa, Artificial Sequence
  Description of Artificial Sequence: Synthetic polypeptide
KVKVLGSGAFGTVYKGIWIPDGENVKIPVAIKVSRENTSP

SEQ ID NO: 743 - protein, 40 aa, Artificial Sequence
  Description of Artificial Sequence: Synthetic polypeptide
HNADLSFLQWIREVTGYVLVAMNEFSTLPLPNLHVVRGTQ

SEQ ID NO: 744 - protein, 40 aa, Artificial Sequence
  Description of Artificial Sequence: Synthetic polypeptide
GYVLVAMNEFSTLPLPNLHVVRGTQVYDGKFAIFVMLNYN

SEQ ID NO: 745 - protein, 40 aa, Artificial Sequence
  Description of Artificial Sequence: Synthetic polypeptide
TKTICAPQCNGHCFGPNPNQCCHDECVGGCSGPQDTDCFA

SEQ ID NO: 746 - protein, 40 aa, Artificial Sequence
  Description of Artificial Sequence: Synthetic polypeptide
DHPHLVRLLRVCLSPTIQLVTQLMPHGCLLEYVHEHKDNI

SEQ ID NO: 747 - protein, 40 aa, Artificial Sequence
  Description of Artificial Sequence: Synthetic polypeptide
PHLVRLLRVCLSPTIQLVTQLMPHGCLLEYVHEHKDNIGS

SEQ ID NO: 748 - protein, 40 aa, Artificial Sequence
  Description of Artificial Sequence: Synthetic polypeptide
LRVCLSPTIQLVTQLMPHGCLLEYVHEHKDNIGSQLLLNW

SEQ ID NO: 749 - protein, 40 aa, Artificial Sequence
  Description of Artificial Sequence: Synthetic polypeptide
NETTGPKANVEFMDEALIMASMDHPHLVRLLVVCLSPTIQ

SEQ ID NO: 750 - protein, 40 aa, Artificial Sequence
  Description of Artificial Sequence: Synthetic polypeptide
EFMDEALIMASMDHPHLVRLLVVCLSPTIQLVTQLMPHGC

SEQ ID NO: 751 - protein, 40 aa, Artificial Sequence
  Description of Artificial Sequence: Synthetic polypeptide
MDEALIMASMDHPHLVRLLVVCLSPTIQLVTQLMPHGCLL

SEQ ID NO: 752 - protein, 40 aa, Artificial Sequence
  Description of Artificial Sequence: Synthetic polypeptide
SRDATLRVWDIETGQCLHVLMGHVAAVRLVQYDGRRVVSG

SEQ ID NO: 753 - protein, 40 aa, Artificial Sequence
  Description of Artificial Sequence: Synthetic polypeptide
TLRVWDIETGQCLHVLMGHVAAVRLVQYDGRRVVSGAYDF

SEQ ID NO: 754 - protein, 40 aa, Artificial Sequence
  Description of Artificial Sequence: Synthetic polypeptide
DIETGQCLHVLMGHVAAVRLVQYDGRRVVSGAYDFMVKVW

SEQ ID NO: 755 - protein, 40 aa, Artificial Sequence
  Description of Artificial Sequence: Synthetic polypeptide
IETGQCLHVLMGHVAAVRLVQYDGRRVVSGAYDFMVKVWD

SEQ ID NO: 756 - protein, 40 aa, Artificial Sequence
  Description of Artificial Sequence: Synthetic polypeptide
TGQCLHVLMGHVAAVRLVQYDGRRVVSGAYDFMVKVWDPE

SEQ ID NO: 757 - protein, 40 aa, Artificial Sequence
  Description of Artificial Sequence: Synthetic polypeptide
CLHVLMGHVAAVRLVQYDGRRVVSGAYDFMVKVWDPETET

SEQ ID NO: 758 - protein, 40 aa, Artificial Sequence
  Description of Artificial Sequence: Synthetic polypeptide
HVLMGHVAAVRLVQYDGRRVVSGAYDFMVKVWDPETETCL

SEQ ID NO: 759 - protein, 40 aa, Artificial Sequence
  Description of Artificial Sequence: Synthetic polypeptide
LMGHVAAVRLVQYDGRRVVSGAYDFMVKVWDPETETCLHT

SEQ ID NO: 760 - protein, 40 aa, Artificial Sequence
  Description of Artificial Sequence: Synthetic polypeptide
GHVAAVRLVQYDGRRVVSGAYDFMVKVWDPETETCLHTLQ

SEQ ID NO: 761 - protein, 40 aa, Artificial Sequence
  Description of Artificial Sequence: Synthetic polypeptide
QYDGRRVVSGAYDFMVKVWDPETETCLHTLQGHTNRVCSL

SEQ ID NO: 762 - protein, 40 aa, Artificial Sequence
  Description of Artificial Sequence: Synthetic polypeptide
DGRRVVSGAYDFMVKVWDPETETCLHTLQGHTNRVCSLQF

SEQ ID NO: 763 - protein, 40 aa, Artificial Sequence
  Description of Artificial Sequence: Synthetic polypeptide
SGAYDFMVKVWDPETETCLHTLQGHTNRVCSLQFDGIHVV

SEQ ID NO: 764 - protein, 40 aa, Artificial Sequence
  Description of Artificial Sequence: Synthetic polypeptide
AYDFMVKVWDPETETCLHTLQGHTNRVCSLQFDGIHVVSG

SEQ ID NO: 765 - protein, 40 aa, Artificial Sequence
  Description of Artificial Sequence: Synthetic polypeptide
MVKVWDPETETCLHTLQGHTNRVCSLQFDGIHVVSGSLDT

SEQ ID NO: 766 - protein, 40 aa, Artificial Sequence
  Description of Artificial Sequence: Synthetic polypeptide
VKVWDPETETCLHTLQGHTNRVCSLQFDGIHVVSGSLDTS

SEQ ID NO: 767 - protein, 40 aa, Artificial Sequence
  Description of Artificial Sequence: Synthetic polypeptide
WDPETETCLHTLQGHTNRVCSLQFDGIHVVSGSLDTSIRV

SEQ ID NO: 768 - protein, 40 aa, Artificial Sequence
  Description of Artificial Sequence: Synthetic polypeptide
PETETCLHTLQGHTNRVCSLQFDGIHVVSGSLDTSIRVWD

SEQ ID NO: 769 - protein, 40 aa, Artificial Sequence
  Description of Artificial Sequence: Synthetic polypeptide
ETETCLHTLQGHTNRVCSLQFDGIHVVSGSLDTSIRVWDV

SEQ ID NO: 770 - protein, 40 aa, Artificial Sequence
  Description of Artificial Sequence: Synthetic polypeptide
ETCLHTLQGHTNRVCSLQFDGIHVVSGSLDTSIRVWDVET

SEQ ID NO: 771 - protein, 40 aa, Artificial Sequence
  Description of Artificial Sequence: Synthetic polypeptide
HTLQGHTNRVCSLQFDGIHVVSGSLDTSIRVWDVETGNCI

SEQ ID NO: 772 - protein, 40 aa, Artificial Sequence
  Description of Artificial Sequence: Synthetic polypeptide
CSLQFDGIHVVSGSLDTSIRVWDVETGNCIHTLTGHQSLT

SEQ ID NO: 773 - protein, 40 aa, Artificial Sequence
  Description of Artificial Sequence: Synthetic polypeptide
YDGRRVVSGAYDFMVKVWDPETETCLHTLQGHTNRVHSLQ

SEQ ID NO: 774 - protein, 40 aa, Artificial Sequence
  Description of Artificial Sequence: Synthetic polypeptide
HTLQGHTNRVHSLQFDGIHVVSGSLDTSIRVWDVETGNCI

SEQ ID NO: 775 - protein, 40 aa, Artificial Sequence
  Description of Artificial Sequence: Synthetic polypeptide
TLQGHTNRVHSLQFDGIHVVSGSLDTSIRVWDVETGNCIH

SEQ ID NO: 776 - protein, 40 aa, Artificial Sequence
  Description of Artificial Sequence: Synthetic polypeptide
NRVHSLQFDGIHVVSGSLDTSIRVWDVETGNCIHTLTGHQ

SEQ ID NO: 777 - protein, 40 aa, Artificial Sequence
  Description of Artificial Sequence: Synthetic polypeptide
VKVWDPETETCLHTLQGHTNRVYSLQFDGIHVVSGSQDTS

SEQ ID NO: 778 - protein, 40 aa, Artificial Sequence
  Description of Artificial Sequence: Synthetic polypeptide
ETCLHTLQGHTNRVYSLQFDGIHVVSGSQDTSIRVWDVET

SEQ ID NO: 779 - protein, 40 aa, Artificial Sequence
  Description of Artificial Sequence: Synthetic polypeptide
LHTLQGHTNRVYSLQFDGIHVVSGSQDTSIRVWDVETGNC

SEQ ID NO: 780 - protein, 40 aa, Artificial Sequence
  Description of Artificial Sequence: Synthetic polypeptide
HTNRVYSLQFDGIHVVSGSQDTSIRVWDVETGNCIHTLTG

SEQ ID NO: 781 - protein, 40 aa, Artificial Sequence
  Description of Artificial Sequence: Synthetic polypeptide
NRVYSLQFDGIHVVSGSQDTSIRVWDVETGNCIHTLTGHQ

SEQ ID NO: 782 - protein, 40 aa, Artificial Sequence
  Description of Artificial Sequence: Synthetic polypeptide
QFDGIHVVSGSQDTSIRVWDVETGNCIHTLTGHQSLTSGM

SEQ ID NO: 783 - protein, 40 aa, Artificial Sequence
  Description of Artificial Sequence: Synthetic polypeptide
RVYSLQFDGIHVVSGSLDTSIRVWDVETGNCIHTLTGHQV

SEQ ID NO: 784 - protein, 40 aa, Artificial Sequence
  Description of Artificial Sequence: Synthetic polypeptide
LQFDGIHVVSGSLDTSIRVWDVETGNCIHTLTGHQVLTSG

SEQ ID NO: 785 - protein, 40 aa, Artificial Sequence
  Description of Artificial Sequence: Synthetic polypeptide
QFDGIHVVSGSLDTSIRVWDVETGNCIHTLTGHQVLTSGM

SEQ ID NO: 786 - protein, 40 aa, Artificial Sequence
  Description of Artificial Sequence: Synthetic polypeptide
SGSLDTSIRVWDVETGNCIHTLTGHQVLTSGMELKDNILV

SEQ ID NO: 787 - protein, 40 aa, Artificial Sequence
  Description of Artificial Sequence: Synthetic polypeptide
LDTSIRVWDVETGNCIHTLTGHQVLTSGMELKDNILVSGN

SEQ ID NO: 788 - protein, 40 aa, Artificial Sequence
  Description of Artificial Sequence: Synthetic polypeptide
GNCIHTLTGHQVLTSGMELKDNILVSGNADSTVKIWDIKT

SEQ ID NO: 789 - protein, 40 aa, Artificial Sequence
  Description of Artificial Sequence: Synthetic polypeptide
HTLTGHQVLTSGMELKDNILVSGNADSTVKIWDIKTGQCL

SEQ ID NO: 790 - protein, 40 aa, Artificial Sequence
  Description of Artificial Sequence: Synthetic polypeptide
DGIHVVSGSLDTSIRVWDVETGNCIHTLTGHQSLTGGMEL

SEQ ID NO: 791 - protein, 40 aa, Artificial Sequence
  Description of Artificial Sequence: Synthetic polypeptide
VSGSLDTSIRVWDVETGNCIHTLTGHQSLTGGMELKDNIL

SEQ ID NO: 792 - protein, 40 aa, Artificial Sequence
  Description of Artificial Sequence: Synthetic polypeptide
CIHTLTGHQSLTGGMELKDNILVSGNADSTVKIWDIKTGQ

SEQ ID NO: 793 - protein, 40 aa, Artificial Sequence
  Description of Artificial Sequence: Synthetic polypeptide
HTLTGHQSLTGGMELKDNILVSGNADSTVKIWDIKTGQCL

SEQ ID NO: 794 - protein, 40 aa, Artificial Sequence
  Description of Artificial Sequence: Synthetic polypeptide
GGMELKDNILVSGNADSTVKIWDIKTGQCLQTLQGPNKHQ

SEQ ID NO: 795 - protein, 40 aa, Artificial Sequence
  Description of Artificial Sequence: Synthetic polypeptide
SLDTSIRVWDVETGNCIHTLTGHQSLTSGMELKDNILVNG

SEQ ID NO: 796 - protein, 40 aa, Artificial Sequence
  Description of Artificial Sequence: Synthetic polypeptide
VETGNCIHTLTGHQSLTSGMELKDNILVNGNADSTVKIWD

SEQ ID NO: 797 - protein, 40 aa, Artificial Sequence
  Description of Artificial Sequence: Synthetic polypeptide
TLTGHQSLTSGMELKDNILVNGNADSTVKIWDIKTGQCLQ

SEQ ID NO: 798 - protein, 40 aa, Artificial Sequence
  Description of Artificial Sequence: Synthetic polypeptide
SGMELKDNILVNGNADSTVKIWDIKTGQCLQTLQGPNKHQ

SEQ ID NO: 799 - protein, 40 aa, Artificial Sequence
  Description of Artificial Sequence: Synthetic polypeptide
DVETGNCIHTLTGHQSLTSGMELKDNILVRGNADSTVKIW

SEQ ID NO: 800 - protein, 40 aa, Artificial Sequence
  Description of Artificial Sequence: Synthetic polypeptide
NCIHTLTGHQSLTSGMELKDNILVRGNADSTVKIWDIKTG

SEQ ID NO: 801 - protein, 40 aa, Artificial Sequence
  Description of Artificial Sequence: Synthetic polypeptide
TLTGHQSLTSGMELKDNILVSENADSTVKIWDIKTGQCLQ

SEQ ID NO: 802 - protein, 40 aa, Artificial Sequence
  Description of Artificial Sequence: Synthetic polypeptide
DNILVSENADSTVKIWDIKTGQCLQTLQGPNKHQSAVTCL

SEQ ID NO: 803 - protein, 40 aa, Artificial Sequence
  Description of Artificial Sequence: Synthetic polypeptide
VWDVETGNCIHTLTGHQSLTSGMELKDNILVSRNADSTVK

SEQ ID NO: 804 - protein, 40 aa, Artificial Sequence
  Description of Artificial Sequence: Synthetic polypeptide
GHQSLTSGMELKDNILVSRNADSTVKIWDIKTGQCLQTLQ

SEQ ID NO: 805 - protein, 40 aa, Artificial Sequence
  Description of Artificial Sequence: Synthetic polypeptide
ELKDNILVSRNADSTVKIWDIKTGQCLQTLQGPNKHQSAV

SEQ ID NO: 806 - protein, 40 aa, Artificial Sequence
  Description of Artificial Sequence: Synthetic polypeptide
DNILVSRNADSTVKIWDIKTGQCLQTLQGPNKHQSAVTCL

SEQ ID NO: 807 - protein, 40 aa, Artificial Sequence
  Description of Artificial Sequence: Synthetic polypeptide
GNCIHTLTGHQSLTSGMELKDNILVSGNANSTVKIWDIKT

SEQ ID NO: 808 - protein, 40 aa, Artificial Sequence
  Description of Artificial Sequence: Synthetic polypeptide
IHTLTGHQSLTSGMELKDNILVSGNANSTVKIWDIKTGQC

SEQ ID NO: 809 - protein, 40 aa, Artificial Sequence
  Description of Artificial Sequence: Synthetic polypeptide
GNADSTVKIWDIKTGQCLQTLQGPNKHQCAVTCLQFNKNF

SEQ ID NO: 810 - protein, 40 aa, Artificial Sequence
  Description of Artificial Sequence: Synthetic polypeptide
IKTGQCLQTLQGPNKHQCAVTCLQFNKNFVITSSDDGTVK

SEQ ID NO: 811 - protein, 40 aa, Artificial Sequence
  Description of Artificial Sequence: Synthetic polypeptide
QCLQTLQGPNKHQCAVTCLQFNKNFVITSSDDGTVKLWDL

SEQ ID NO: 812 - protein, 40 aa, Artificial Sequence
  Description of Artificial Sequence: Synthetic polypeptide
LQTLQGPNKHQCAVTCLQFNKNFVITSSDDGTVKLWDLKT

SEQ ID NO: 813 - protein, 40 aa, Artificial Sequence
  Description of Artificial Sequence: Synthetic polypeptide
QHWSLIMESVVPSDKGNYTCVVENEYGSINHTYHLDVVEQ

SEQ ID NO: 814 - protein, 40 aa, Artificial Sequence
  Description of Artificial Sequence: Synthetic polypeptide
KEAVTVAVKMLKDDATEKDLSDLVSEMEMMKMIGKQKNII

SEQ ID NO: 815 - protein, 40 aa, Artificial Sequence
  Description of Artificial Sequence: Synthetic polypeptide
AVTVAVKMLKDDATEKDLSDLVSEMEMMKMIGKQKNIINL

SEQ ID NO: 816 - protein, 40 aa, Artificial Sequence
  Description of Artificial Sequence: Synthetic polypeptide
AVKMLKDDATEKDLSDLVSEMEMMKMIGKQKNIINLLGAC

SEQ ID NO: 817 - protein, 40 aa, Artificial Sequence
  Description of Artificial Sequence: Synthetic polypeptide
MLKDDATEKDLSDLVSEMEMMKMIGKQKNIINLLGACTQD

SEQ ID NO: 818 - protein, 40 aa, Artificial Sequence
  Description of Artificial Sequence: Synthetic polypeptide
DDATEKDLSDLVSEMEMMKMIGKQKNIINLLGACTQDGPL

SEQ ID NO: 819 - protein, 40 aa, Artificial Sequence
  Description of Artificial Sequence: Synthetic polypeptide
QKNIINLLGACTQDGPLYVIVEYASKGNLREYLRARRPPG

SEQ ID NO: 820 - protein, 40 aa, Artificial Sequence
  Description of Artificial Sequence: Synthetic polypeptide
ECSPHRPILQAGLPANQTAVLGSDVEFHCKVYSDAQPHIQ

SEQ ID NO: 821 - protein, 40 aa, Artificial Sequence
  Description of Artificial Sequence: Synthetic polypeptide
QWSLVMESVVPSDRGNYTCVVENKFGSIRQTYTLDVLERC

SEQ ID NO: 822 - protein, 40 aa, Artificial Sequence
  Description of Artificial Sequence: Synthetic polypeptide
WSLVMESVVPSDRGNYTCVVENKFGSIRQTYTLDVLERCP

SEQ ID NO: 823 - protein, 40 aa, Artificial Sequence
  Description of Artificial Sequence: Synthetic polypeptide
GSIRQTYTLDVLERCPHRPILQAGLPANQTAVLGSDVEFH

SEQ ID NO: 824 - protein, 40 aa, Artificial Sequence
  Description of Artificial Sequence: Synthetic polypeptide
CPHRPILQAGLPANQTAVLGSDVEFHCKVYSDAQPHIQWL

SEQ ID NO: 825 - protein, 40 aa, Artificial Sequence
  Description of Artificial Sequence: Synthetic polypeptide
QVTGSSDNEYFYVDFREYEYDLKWEFPRENLEFGKVLESG

SEQ ID NO: 826 - protein, 40 aa, Artificial Sequence
  Description of Artificial Sequence: Synthetic polypeptide
VTGSSDNEYFYVDFREYEYDLKWEFPRENLEFGKVLESGA

SEQ ID NO: 827 - protein, 40 aa, Artificial Sequence
  Description of Artificial Sequence: Synthetic polypeptide
TGSSDNEYFYVDFREYEYDLKWEFPRENLEFGKVLESGAF

SEQ ID NO: 828 - protein, 40 aa, Artificial Sequence
  Description of Artificial Sequence: Synthetic polypeptide
GSSDNEYFYVDFREYEYDLKWEFPRENLEFGKVLESGAFG

SEQ ID NO: 829 - protein, 40 aa, Artificial Sequence
  Description of Artificial Sequence: Synthetic polypeptide
SSDNEYFYVDFREYEYDLKWEFPRENLEFGKVLESGAFGK

SEQ ID NO: 830 - protein, 40 aa, Artificial Sequence
  Description of Artificial Sequence: Synthetic polypeptide
SDNEYFYVDFREYEYDLKWEFPRENLEFGKVLESGAFGKV

SEQ ID NO: 831 - protein, 40 aa, Artificial Sequence
  Description of Artificial Sequence: Synthetic polypeptide
DNEYFYVDFREYEYDLKWEFPRENLEFGKVLESGAFGKVM

SEQ ID NO: 832 - protein, 40 aa, Artificial Sequence
  Description of Artificial Sequence: Synthetic polypeptide
FYVDFREYEYDLKWEFPRENLEFGKVLESGAFGKVMNATA

SEQ ID NO: 833 - protein, 40 aa, Artificial Sequence
  Description of Artificial Sequence: Synthetic polypeptide
FREYEYDLKWEFPRENLEFGKVLESGAFGKVMNATAYGIS

SEQ ID NO: 834 - protein, 40 aa, Artificial Sequence
  Description of Artificial Sequence: Synthetic polypeptide
EYEYDLKWEFPRENLEFGKVLESGAFGKVMNATAYGISKT

SEQ ID NO: 835 - protein, 40 aa, Artificial Sequence
  Description of Artificial Sequence: Synthetic polypeptide
KWEFPRENLEFGKVLESGAFGKVMNATAYGISKTGVSIQV

SEQ ID NO: 836 - protein, 40 aa, Artificial Sequence
  Description of Artificial Sequence: Synthetic polypeptide
FPRENLEFGKVLESGAFGKVMNATAYGISKTGVSIQVAVK

SEQ ID NO: 837 - protein, 40 aa, Artificial Sequence
  Description of Artificial Sequence: Synthetic polypeptide
PRENLEFGKVLESGAFGKVMNATAYGISKTGVSIQVAVKM

SEQ ID NO: 838 - protein, 40 aa, Artificial Sequence
  Description of Artificial Sequence: Synthetic polypeptide
RENLEFGKVLESGAFGKVMNATAYGISKTGVSIQVAVKML

SEQ ID NO: 839 - protein, 40 aa, Artificial Sequence
  Description of Artificial Sequence: Synthetic polypeptide
FGKVLESGAFGKVMNATAYGISKTGVSIQVAVKMLKEKAD

SEQ ID NO: 840 - protein, 40 aa, Artificial Sequence
  Description of Artificial Sequence: Synthetic polypeptide
KVLESGAFGKVMNATAYGISKTGVSIQVAVKMLKEKADSS

SEQ ID NO: 841 - protein, 40 aa, Artificial Sequence
  Description of Artificial Sequence: Synthetic polypeptide
QVTGSSDNEYFYVDFREYEYDLKWEFPRENLEFGKVLGLG

SEQ ID NO: 842 - protein, 40 aa, Artificial Sequence
  Description of Artificial Sequence: Synthetic polypeptide
VTGSSDNEYFYVDFREYEYDLKWEFPRENLEFGKVLGLGA

SEQ ID NO: 843 - protein, 40 aa, Artificial Sequence
  Description of Artificial Sequence: Synthetic polypeptide
TGSSDNEYFYVDFREYEYDLKWEFPRENLEFGKVLGLGAF

SEQ ID NO: 844 - protein, 40 aa, Artificial Sequence
  Description of Artificial Sequence: Synthetic polypeptide
GSSDNEYFYVDFREYEYDLKWEFPRENLEFGKVLGLGAFG

SEQ ID NO: 845 - protein, 40 aa, Artificial Sequence
  Description of Artificial Sequence: Synthetic polypeptide
SSDNEYFYVDFREYEYDLKWEFPRENLEFGKVLGLGAFGK

SEQ ID NO: 846 - protein, 40 aa, Artificial Sequence
  Description of Artificial Sequence: Synthetic polypeptide
SDNEYFYVDFREYEYDLKWEFPRENLEFGKVLGLGAFGKV

SEQ ID NO: 847 - protein, 40 aa, Artificial Sequence
  Description of Artificial Sequence: Synthetic polypeptide
DNEYFYVDFREYEYDLKWEFPRENLEFGKVLGLGAFGKVM

SEQ ID NO: 848 - protein, 40 aa, Artificial Sequence
  Description of Artificial Sequence: Synthetic polypeptide
YVDFREYEYDLKWEFPRENLEFGKVLGLGAFGKVMNATAY

SEQ ID NO: 849 - protein, 40 aa, Artificial Sequence
  Description of Artificial Sequence: Synthetic polypeptide
DFREYEYDLKWEFPRENLEFGKVLGLGAFGKVMNATAYGI

SEQ ID NO: 850 - protein, 40 aa, Artificial Sequence
  Description of Artificial Sequence: Synthetic polypeptide
FREYEYDLKWEFPRENLEFGKVLGLGAFGKVMNATAYGIS

SEQ ID NO: 851 - protein, 40 aa, Artificial Sequence
  Description of Artificial Sequence: Synthetic polypeptide
EYEYDLKWEFPRENLEFGKVLGLGAFGKVMNATAYGISKT

SEQ ID NO: 852 - protein, 40 aa, Artificial Sequence
  Description of Artificial Sequence: Synthetic polypeptide
EYDLKWEFPRENLEFGKVLGLGAFGKVMNATAYGISKTGV

SEQ ID NO: 853 - protein, 40 aa, Artificial Sequence
  Description of Artificial Sequence: Synthetic polypeptide
WEFPRENLEFGKVLGLGAFGKVMNATAYGISKTGVSIQVA

SEQ ID NO: 854 - protein, 40 aa, Artificial Sequence
  Description of Artificial Sequence: Synthetic polypeptide
LGLGAFGKVMNATAYGISKTGVSIQVAVKMLKEKADSSER

SEQ ID NO: 855 - protein, 40 aa, Artificial Sequence
  Description of Artificial Sequence: Synthetic polypeptide
LGAFGKVMNATAYGISKTGVSIQVAVKMLKEKADSSEREA

SEQ ID NO: 856 - protein, 40 aa, Artificial Sequence
  Description of Artificial Sequence: Synthetic polypeptide
PILVELDGDVNGHKFSVSGEGEGDATYGKLTLKFICTTGK

SEQ ID NO: 857 - protein, 40 aa, Artificial Sequence
  Description of Artificial Sequence: Synthetic polypeptide
YVQERTIFFKDDGNYKTRAEVKFEGDTLVNRIELKGIDFK

SEQ ID NO: 858 - protein, 40 aa, Artificial Sequence
  Description of Artificial Sequence: Synthetic polypeptide
RIELKGIDFKEDGNILGHKLEYNYNSHNVYIMADKQKNGI

SEQ ID NO: 859 - protein, 40 aa, Artificial Sequence
  Description of Artificial Sequence: Synthetic polypeptide
TQQDVLRVCVPTTGIIEYPFDLENIIFRMVDVGGQRSERR

SEQ ID NO: 860 - protein, 40 aa, Artificial Sequence
  Description of Artificial Sequence: Synthetic polypeptide
RVCVPTTGIIEYPFDLENIIFRMVDVGGQRSERRKWIHCF

SEQ ID NO: 861 - protein, 40 aa, Artificial Sequence
  Description of Artificial Sequence: Synthetic polypeptide
VCVPTTGIIEYPFDLENIIFRMVDVGGQRSERRKWIHCFE

SEQ ID NO: 862 - protein, 40 aa, Artificial Sequence
  Description of Artificial Sequence: Synthetic polypeptide
CVPTTGIIEYPFDLENIIFRMVDVGGQRSERRKWIHCFEN

SEQ ID NO: 863 - protein, 40 aa, Artificial Sequence
  Description of Artificial Sequence: Synthetic polypeptide
YPFDLENIIFRMVDVGGHRSERRKWIHCFENVTSIMFLVA

SEQ ID NO: 864 - protein, 40 aa, Artificial Sequence
  Description of Artificial Sequence: Synthetic polypeptide
DVGGPRSERRKWIHCFENVTSIMFLVALSEYDQVLVESDN

SEQ ID NO: 865 - protein, 40 aa, Artificial Sequence
  Description of Artificial Sequence: Synthetic polypeptide
VTSIMFLVALSEYDQVLVESDNENGMEESKALFRTIITYP

SEQ ID NO: 866 - protein, 40 aa, Artificial Sequence
  Description of Artificial Sequence: Synthetic polypeptide
GMEESKALFRTIITYPWFQNSSVILFLNKKDLLEEKIMYS

SEQ ID NO: 867 - protein, 40 aa, Artificial Sequence
  Description of Artificial Sequence: Synthetic polypeptide
ATRSPGVVISDDEPGYDLDLFCIPNHYAEDLERVFIPHGL

SEQ ID NO: 868 - protein, 40 aa, Artificial Sequence
  Description of Artificial Sequence: Synthetic polypeptide
FIPHGLIMDRTERLARDVMKEMGGHHIVALCVLKGGYKFF

SEQ ID NO: 869 - protein, 40 aa, Artificial Sequence
  Description of Artificial Sequence: Synthetic polypeptide
HHIVALCVLKGGYKFFADLLDYIKALNRNSDRSIPMTVDF

SEQ ID NO: 870 - protein, 40 aa, Artificial Sequence
  Description of Artificial Sequence: Synthetic polypeptide
CVLKGGYKFFADLLDYIKALNRNSDRSIPMTVDFIRLKSY

SEQ ID NO: 871 - protein, 40 aa, Artificial Sequence
  Description of Artificial Sequence: Synthetic polypeptide
DRSIPMTVDFIRLKSYCNDQSTGDIKVIGGDDLSTLTGKN

SEQ ID NO: 872 - protein, 40 aa, Artificial Sequence
  Description of Artificial Sequence: Synthetic polypeptide
DFIRLKSYCNDQSTGDIKVIGGDDLSTLTGKNVLIVEDII

SEQ ID NO: 873 - protein, 40 aa, Artificial Sequence
  Description of Artificial Sequence: Synthetic polypeptide
ASLLVKRTPRSVGYKPDFVGFEIPDKFVVGYALDYNEYFR

SEQ ID NO: 874 - protein, 40 aa, Artificial Sequence
  Description of Artificial Sequence: Synthetic polypeptide
LVKRTPRSVGYKPDFVGFEIPDKFVVGYALDYNEYFRDLN

SEQ ID NO: 875 - protein, 40 aa, Artificial Sequence
  Description of Artificial Sequence: Synthetic polypeptide
VKRTPRSVGYKPDFVGFEIPDKFVVGYALDYNEYFRDLNH

SEQ ID NO: 876 - protein, 40 aa, Artificial Sequence
  Description of Artificial Sequence: Synthetic polypeptide
SDDVPMVLVGNNCDLAARTVESRQAQDLARSYGIPYIETS

SEQ ID NO: 877 - protein, 40 aa, Artificial Sequence
  Description of Artificial Sequence: Synthetic polypeptide
DDVPMVLVGNNCDLAARTVESRQAQDLARSYGIPYIETSA

SEQ ID NO: 878 - protein, 40 aa, Artificial Sequence
  Description of Artificial Sequence: Synthetic polypeptide
VFAINNTKSFEDIHQYREQIKRVKDSDDVPMVLVGNRCDL

SEQ ID NO: 879 - protein, 40 aa, Artificial Sequence
  Description of Artificial Sequence: Synthetic polypeptide
GARGVGKSALTIQLIQNHFVDEYDPTIEDSYRKQVVIDGE

SEQ ID NO: 880 - protein, 40 aa, Artificial Sequence
  Description of Artificial Sequence: Synthetic polypeptide
TEYKLVVVGAVGVGKSALTIQLIQNHFVDEYDPTIEDSYR

SEQ ID NO: 881 - protein, 40 aa, Artificial Sequence
  Description of Artificial Sequence: Synthetic polypeptide
KLVVVGAVGVGKSALTIQLIQNHFVDEYDPTIEDSYRKQV

SEQ ID NO: 882 - protein, 40 aa, Artificial Sequence
  Description of Artificial Sequence: Synthetic polypeptide
LVVVGAGRVGKSALTIQLIQNHFVDEYDPTIEDSYRKQVV

SEQ ID NO: 883 - protein, 40 aa, Artificial Sequence
  Description of Artificial Sequence: Synthetic polypeptide
VGAGRVGKSALTIQLIQNHFVDEYDPTIEDSYRKQVVIDG

SEQ ID NO: 884 - protein, 40 aa, Artificial Sequence
  Description of Artificial Sequence: Synthetic polypeptide
GAGVVGKSALTIQLIQNHFVDEYDPTIEDSYRKQVVIDGE

SEQ ID NO: 885 - protein, 40 aa, Artificial Sequence
  Description of Artificial Sequence: Synthetic polypeptide
QNHFVDEYDPTIEDSYRKQVVIDGETCLLDILDTTGQEEY

SEQ ID NO: 886 - protein, 40 aa, Artificial Sequence
  Description of Artificial Sequence: Synthetic polypeptide
FVDEYDPTIEDSYRKQVVIDGETCLLDILDTTGQEEYSAM

SEQ ID NO: 887 - protein, 40 aa, Artificial Sequence
  Description of Artificial Sequence: Synthetic polypeptide
ILDTTGQEEYSAMRDQYMRTGEGFLCVFAINNTKSFEDIH

SEQ ID NO: 888 - protein, 40 aa, Artificial Sequence
  Description of Artificial Sequence: Synthetic polypeptide
TTGQEEYSAMRDQYMRTGEGFLCVFAINNTKSFEDIHQYR

SEQ ID NO: 889 - protein, 40 aa, Artificial Sequence
  Description of Artificial Sequence: Synthetic polypeptide
FVDEYDPTIEDSYRKQVVIDGETCLLDILDTAVQEEYSAM

SEQ ID NO: 890 - protein, 40 aa, Artificial Sequence
  Description of Artificial Sequence: Synthetic polypeptide
DGETCLLDILDTAVQEEYSAMRDQYMRTGEGFLCVFAINN

SEQ ID NO: 891 - protein, 40 aa, Artificial Sequence
  Description of Artificial Sequence: Synthetic polypeptide
ILDTAVQEEYSAMRDQYMRTGEGFLCVFAINNTKSFEDIH

SEQ ID NO: 892 - protein, 40 aa, Artificial Sequence
  Description of Artificial Sequence: Synthetic polypeptide
LDILDTAGKEEYSAMRDQYMRTGEGFLCVFAINNTKSFED

SEQ ID NO: 893 - protein, 40 aa, Artificial Sequence
  Description of Artificial Sequence: Synthetic polypeptide
HFVDEYDPTIEDSYRKQVVIDGETCLLDILDTAGLEEYSA

SEQ ID NO: 894 - protein, 40 aa, Artificial Sequence
  Description of Artificial Sequence: Synthetic polypeptide
ILDTAGLEEYSAMRDQYMRTGEGFLCVFAINNTKSFEDIH

SEQ ID NO: 895 - protein, 40 aa, Artificial Sequence
  Description of Artificial Sequence: Synthetic polypeptide
VFREAIICKNIPRLVSGWVKPIIIGCHAYGDQYRATDFVV

SEQ ID NO: 896 - protein, 40 aa, Artificial Sequence
  Description of Artificial Sequence: Synthetic polypeptide
LVSGWVKPIIIGCHAYGDQYRATDFVVPGPGKVEITYTPS

SEQ ID NO: 897 - protein, 40 aa, Artificial Sequence
  Description of Artificial Sequence: Synthetic polypeptide
VSGWVKPIIIGCHAYGDQYRATDFVVPGPGKVEITYTPSD

SEQ ID NO: 898 - protein, 40 aa, Artificial Sequence
  Description of Artificial Sequence: Synthetic polypeptide
WVKPIIIGHHAYGDQYRATDFVVPGPGKVEITYTPSDGTQ

SEQ ID NO: 899 - protein, 40 aa, Artificial Sequence
  Description of Artificial Sequence: Synthetic polypeptide
KYSVAVKCATITPDEARVEEFKLKKMWKSPNETIRNILGG

SEQ ID NO: 900 - protein, 40 aa, Artificial Sequence
  Description of Artificial Sequence: Synthetic polypeptide
GGHAHGDQYKATDFVADRAGTFKMVFTPKDGSGVKEWEVY

SEQ ID NO: 901 - protein, 40 aa, Artificial Sequence
  Description of Artificial Sequence: Synthetic polypeptide
EPIICKNIPRLVPGWTKPITIGKHAHGDQYKATDFVADRA

SEQ ID NO: 902 - protein, 40 aa, Artificial Sequence
  Description of Artificial Sequence: Synthetic polypeptide
PGWTKPITIGKHAHGDQYKATDFVADRAGTFKMVFTPKDG

SEQ ID NO: 903 - protein, 40 aa, Artificial Sequence
  Description of Artificial Sequence: Synthetic polypeptide
GKHAHGDQYKATDFVADRAGTFKMVFTPKDGSGVKEWEVY

SEQ ID NO: 904 - protein, 40 aa, Artificial Sequence
  Description of Artificial Sequence: Synthetic polypeptide
IGSHAHGDQYKATDFVADRAGTFKMVFTPKDGSGVKEWEV

SEQ ID NO: 905 - protein, 40 aa, Artificial Sequence
  Description of Artificial Sequence: Synthetic polypeptide
SHAHGDQYKATDFVADRAGTFKMVFTPKDGSGVKEWEVYN

SEQ ID NO: 906 - protein, 40 aa, Artificial Sequence
  Description of Artificial Sequence: Synthetic polypeptide
VVSIEGIHPKVMERLIEFAYTASISMGEKCALHVMNGAVM

SEQ ID NO: 907 - protein, 40 aa, Artificial Sequence
  Description of Artificial Sequence: Synthetic polypeptide
QVMPCRAPKVGRLIYTAGDYFRQSLSYLEAYNPSDGTWLR

SEQ ID NO: 908 - protein, 40 aa, Artificial Sequence
  Description of Artificial Sequence: Synthetic polypeptide
CRAPKVGRLIYTAGDYFRQSLSYLEAYNPSDGTWLRLADL

SEQ ID NO: 909 - protein, 40 aa, Artificial Sequence
  Description of Artificial Sequence: Synthetic polypeptide
QVMPCRAPKVGRLIYTAGSYFRQSLSYLEAYNPSDGTWLR

SEQ ID NO: 910 - protein, 40 aa, Artificial Sequence
  Description of Artificial Sequence: Synthetic polypeptide
QWSPCAPMSVPHNRIGVGVIDGHIYAVGGSHGCIHHNSVE

SEQ ID NO: 911 - protein, 40 aa, Artificial Sequence
  Description of Artificial Sequence: Synthetic polypeptide
HNRIGVGVIDGHIYAVGGSHGCIHHNSVERYEPERDEWHL

SEQ ID NO: 912 - protein, 40 aa, Artificial Sequence
  Description of Artificial Sequence: Synthetic polypeptide
LTRRIGVGVAVLNRLLYAVGSFDGTNRLNSAECYYPERNE

SEQ ID NO: 913 - protein, 40 aa, Artificial Sequence
  Description of Artificial Sequence: Synthetic polypeptide
RRIGVGVAVLNRLLYAVGSFDGTNRLNSAECYYPERNEWR

SEQ ID NO: 914 - protein, 40 aa, Artificial Sequence
  Description of Artificial Sequence: Synthetic polypeptide
AVGSFDGTNRLNSAECYYPERNEWRMITAMNTIRSGAGVC

SEQ ID NO: 915 - protein, 40 aa, Artificial Sequence
  Description of Artificial Sequence: Synthetic polypeptide
APMLTRRIGVGVAVLNRLLYAVGGFDGTNCLNSAECYYPE

SEQ ID NO: 916 - protein, 40 aa, Artificial Sequence
  Description of Artificial Sequence: Synthetic polypeptide
TRRIGVGVAVLNRLLYAVGGFDGTNCLNSAECYYPERNEW

SEQ ID NO: 917 - protein, 40 aa, Artificial Sequence
  Description of Artificial Sequence: Synthetic polypeptide
PERNEWRMITAMNTIRSGAGVCVLHNCIYAAGCYDGQDQL

SEQ ID NO: 918 - protein, 40 aa, Artificial Sequence
  Description of Artificial Sequence: Synthetic polypeptide
AECYYPERNEWRMITAMNTIRSGAGVCVLHNCIYAAGGCD

SEQ ID NO: 919 - protein, 40 aa, Artificial Sequence
  Description of Artificial Sequence: Synthetic polypeptide
IRSGAGVCVLHNCIYAAGGCDGQDQLNSVERYDVETETWT

SEQ ID NO: 920 - protein, 40 aa, Artificial Sequence
  Description of Artificial Sequence: Synthetic polypeptide
RSGAGVCVLHNCIYAAGGCDGQDQLNSVERYDVETETWTF

SEQ ID NO: 921 - protein, 40 aa, Artificial Sequence
  Description of Artificial Sequence: Synthetic polypeptide
IYVLGDYDGHTFLDSVECYDPDTDTWSEVTRMTSGRSGVG

SEQ ID NO: 922 - protein, 40 aa, Artificial Sequence
  Description of Artificial Sequence: Synthetic polypeptide
LIGFVIVAGMMCIIVMILTYKYLQKPMYEVQWKGVEEING

SEQ ID NO: 923 - protein, 40 aa, Artificial Sequence
  Description of Artificial Sequence: Synthetic polypeptide
FVIVAGMMCIIVMILTYKYLQKPMYEVQWKGVEEINGNNY

SEQ ID NO: 924 - protein, 40 aa, Artificial Sequence
  Description of Artificial Sequence: Synthetic polypeptide
VMILTYKYLQKPMYEVQWKGVEEINGNNYVYIDPTQLPYD

SEQ ID NO: 925 - protein, 40 aa, Artificial Sequence
  Description of Artificial Sequence: Synthetic polypeptide
QKPMYEVQWKGVEEINGNNYVYIDPTQLPYDHKWEFPRNR

SEQ ID NO: 926 - protein, 40 aa, Artificial Sequence
  Description of Artificial Sequence: Synthetic polypeptide
MMCIIVMILTYKYLQKPMYEVQWKVVEEINGNNYVYIDQT

SEQ ID NO: 927 - protein, 40 aa, Artificial Sequence
  Description of Artificial Sequence: Synthetic polypeptide
IVMILTYKYLQKPMYEVQWKVVEEINGNNYVYIDQTQLPY

SEQ ID NO: 928 - protein, 40 aa, Artificial Sequence
  Description of Artificial Sequence: Synthetic polypeptide
TYKYLQKPMYEVQWKVVEEINGNNYVYIDQTQLPYDHKWE

SEQ ID NO: 929 - protein, 40 aa, Artificial Sequence
  Description of Artificial Sequence: Synthetic polypeptide
KYLQKPMYEVQWKVVEEINGNNYVYIDQTQLPYDHKWEFP

SEQ ID NO: 930 - protein, 40 aa, Artificial Sequence
  Description of Artificial Sequence: Synthetic polypeptide
QKPMYEVQWKVVEEINGNNYVYIDQTQLPYDHKWEFPRNR

SEQ ID NO: 931 - protein, 40 aa, Artificial Sequence
  Description of Artificial Sequence: Synthetic polypeptide
INGNNYVYIDQTQLPYDHKWEFPRNRLSFGKTLGAGAFGK

SEQ ID NO: 932 - protein, 40 aa, Artificial Sequence
  Description of Artificial Sequence: Synthetic polypeptide
MILTYKYLQKPMYEVQWKVVEEINGNNYVYIDPTQPPYDH

SEQ ID NO: 933 - protein, 40 aa, Artificial Sequence
  Description of Artificial Sequence: Synthetic polypeptide
LIKSDAAMTVAVKMLKPSAHLTEREVLMSELKVLSYLGNH

SEQ ID NO: 934 - protein, 40 aa, Artificial Sequence
  Description of Artificial Sequence: Synthetic polypeptide
MTVAVKMLKPSAHLTEREVLMSELKVLSYLGNHMNIVNLL

SEQ ID NO: 935 - protein, 40 aa, Artificial Sequence
  Description of Artificial Sequence: Synthetic polypeptide
FGKVVEATAYGLIKSDAAMTVAVKMLKPSAHLTEREAHMS

SEQ ID NO: 936 - protein, 40 aa, Artificial Sequence
  Description of Artificial Sequence: Synthetic polypeptide
IKSDAAMTVAVKMLKPSAHLTEREAHMSELKVLSYLGNHM

SEQ ID NO: 937 - protein, 40 aa, Artificial Sequence
  Description of Artificial Sequence: Synthetic polypeptide
KSDAAMTVAVKMLKPSAHLTEREAHMSELKVLSYLGNHMN

SEQ ID NO: 938 - protein, 40 aa, Artificial Sequence
  Description of Artificial Sequence: Synthetic polypeptide
AMTVAVKMLKPSAHLTEREAHMSELKVLSYLGNHMNIVNL

SEQ ID NO: 939 - protein, 40 aa, Artificial Sequence
  Description of Artificial Sequence: Synthetic polypeptide
MTVAVKMLKPSAHLTEREAHMSELKVLSYLGNHMNIVNLL

SEQ ID NO: 940 - protein, 40 aa, Artificial Sequence
  Description of Artificial Sequence: Synthetic polypeptide
AVKMLKPSAHLTEREAHMSELKVLSYLGNHMNIVNLLGAC

SEQ ID NO: 941 - protein, 40 aa, Artificial Sequence
  Description of Artificial Sequence: Synthetic polypeptide
MLKPSAHLTEREAHMSELKVLSYLGNHMNIVNLLGACTIG

SEQ ID NO: 942 - protein, 40 aa, Artificial Sequence
  Description of Artificial Sequence: Synthetic polypeptide
AHMSELKVLSYLGNHMNIVNLLGACTIGGPTLVITEYCCY

SEQ ID NO: 943 - protein, 40 aa, Artificial Sequence
  Description of Artificial Sequence: Synthetic polypeptide
ATAYGLIKSDAAMTVAVKMLKPSAHLTEREALMSELEVLS

SEQ ID NO: 944 - protein, 40 aa, Artificial Sequence
  Description of Artificial Sequence: Synthetic polypeptide
KSDAAMTVAVKMLKPSAHLTEREALMSELEVLSYLGNHMN

SEQ ID NO: 945 - protein, 40 aa, Artificial Sequence
  Description of Artificial Sequence: Synthetic polypeptide
MTVAVKMLKPSAHLTEREALMSELEVLSYLGNHMNIVNLL

SEQ ID NO: 946 - protein, 40 aa, Artificial Sequence
  Description of Artificial Sequence: Synthetic polypeptide
EREALMSELEVLSYLGNHMNIVNLLGACTIGGPTLVITEY

SEQ ID NO: 947 - protein, 40 aa, Artificial Sequence
  Description of Artificial Sequence: Synthetic polypeptide
REALMSELEVLSYLGNHMNIVNLLGACTIGGPTLVITEYC

SEQ ID NO: 948 - protein, 40 aa, Artificial Sequence
  Description of Artificial Sequence: Synthetic polypeptide
LEVLSYLGNHMNIVNLLGACTIGGPTLVITEYCCYGDLLN

SEQ ID NO: 949 - protein, 40 aa, Artificial Sequence
  Description of Artificial Sequence: Synthetic polypeptide
FGLARVIKNDSNYVVKGNARLPVKWMAPESIFNCVYTFES

SEQ ID NO: 950 - protein, 40 aa, Artificial Sequence
  Description of Artificial Sequence: Synthetic polypeptide
LARYIKNDSNYVVKGNARLPVKWMAPESIFNCVYTFESDV

SEQ ID NO: 951 - protein, 40 aa, Artificial Sequence
  Description of Artificial Sequence: Synthetic polypeptide
QAPERSKEDANCAVCDSPGDLLDQFFCTTCGQHYHGMYLD

SEQ ID NO: 952 - protein, 40 aa, Artificial Sequence
  Description of Artificial Sequence: Synthetic polypeptide
EDANCAVCDSPGDLLDQFFCTTCGQHYHGMYLDIAVTPLK

SEQ ID NO: 953 - protein, 40 aa, Artificial Sequence
  Description of Artificial Sequence: Synthetic polypeptide
ANCAVCDSPGDLLDQFFCTTCGQHYHGMYLDIAVTPLKRA

SEQ ID NO: 954 - protein, 40 aa, Artificial Sequence
  Description of Artificial Sequence: Synthetic polypeptide
VCDSPGDLLDQFFCTTCGQHYHGMYLDIAVTPLKRAGWQC

SEQ ID NO: 955 - protein, 40 aa, Artificial Sequence
  Description of Artificial Sequence: Synthetic polypeptide
PGDLLDQFFCTTCGQHYHGMYLDIAVTPLKRAGWQCPECK

SEQ ID NO: 956 - protein, 40 aa, Artificial Sequence
  Description of Artificial Sequence: Synthetic polypeptide
FFCTTCGQHYHGMYLDIAVTPLKRAGWQCPECKVCQNCKQ

SEQ ID NO: 957 - protein, 40 aa, Artificial Sequence
  Description of Artificial Sequence: Synthetic polypeptide
QHYHGMYLDIAVTPLKRAGWQCPECKVCQNCKQSGEDSKM

SEQ ID NO: 958 - protein, 40 aa, Artificial Sequence
  Description of Artificial Sequence: Synthetic polypeptide
SPGDLLDQFFCTTCGQHYHGMCLDIAVTPLKRAGWQYPEC

SEQ ID NO: 959 - protein, 40 aa, Artificial Sequence
  Description of Artificial Sequence: Synthetic polypeptide
DLLDQFFCTTCGQHYHGMCLDIAVTPLKRAGWQYPECKVC

SEQ ID NO: 960 - protein, 40 aa, Artificial Sequence
  Description of Artificial Sequence: Synthetic polypeptide
CGQHYHGMCLDIAVTPLKRAGWQYPECKVCQNCKQSGEDS

SEQ ID NO: 961 - protein, 40 aa, Artificial Sequence
  Description of Artificial Sequence: Synthetic polypeptide
WQYPECKVCQNCKQSGEDSKMLVCDTCDKGYHTFCLQPVM

SEQ ID NO: 962 - protein, 40 aa, Artificial Sequence
  Description of Artificial Sequence: Synthetic polypeptide
FLCVFAINNTKSFEDIHHYREQIKRVKDSEDVPMVLVGNN

SEQ ID NO: 963 - protein, 40 aa, Artificial Sequence
  Description of Artificial Sequence: Synthetic polypeptide
LCVFAINNTKSFEDIHHYREQIKRVKDSEDVPMVLVGNNC

SEQ ID NO: 964 - protein, 40 aa, Artificial Sequence
  Description of Artificial Sequence: Synthetic polypeptide
CVFAINNTKSFEDIHHYREQIKRVKDSEDVPMVLVGNNCD

SEQ ID NO: 965 - protein, 40 aa, Artificial Sequence
  Description of Artificial Sequence: Synthetic polypeptide
VFAINNTKSFEDIHHYREQIKRVKDSEDVPMVLVGNNCDL

SEQ ID NO: 966 - protein, 40 aa, Artificial Sequence
  Description of Artificial Sequence: Synthetic polypeptide
FAINNTKSFEDIHHYREQIKRVKDSEDVPMVLVGNNCDLP

SEQ ID NO: 967 - protein, 40 aa, Artificial Sequence
  Description of Artificial Sequence: Synthetic polypeptide
AINNTKSFEDIHHYREQIKRVKDSEDVPMVLVGNNCDLPS

SEQ ID NO: 968 - protein, 40 aa, Artificial Sequence
  Description of Artificial Sequence: Synthetic polypeptide
INNTKSFEDIHHYREQIKRVKDSEDVPMVLVGNNCDLPSR

SEQ ID NO: 969 - protein, 40 aa, Artificial Sequence
  Description of Artificial Sequence: Synthetic polypeptide
NNTKSFEDIHHYREQIKRVKDSEDVPMVLVGNNCDLPSRT

SEQ ID NO: 970 - protein, 40 aa, Artificial Sequence
  Description of Artificial Sequence: Synthetic polypeptide
NTKSFEDIHHYREQIKRVKDSEDVPMVLVGNNCDLPSRTV

SEQ ID NO: 971 - protein, 40 aa, Artificial Sequence
  Description of Artificial Sequence: Synthetic polypeptide
TKSFEDIHHYREQIKRVKDSEDVPMVLVGNNCDLPSRTVD

SEQ ID NO: 972 - protein, 40 aa, Artificial Sequence
  Description of Artificial Sequence: Synthetic polypeptide
KSFEDIHHYREQIKRVKDSEDVPMVLVGNNCDLPSRTVDT

SEQ ID NO: 973 - protein, 40 aa, Artificial Sequence
  Description of Artificial Sequence: Synthetic polypeptide
SFEDIHHYREQIKRVKDSEDVPMVLVGNNCDLPSRTVDTK

SEQ ID NO: 974 - protein, 40 aa, Artificial Sequence
  Description of Artificial Sequence: Synthetic polypeptide
FEDIHHYREQIKRVKDSEDVPMVLVGNNCDLPSRTVDTKQ

SEQ ID NO: 975 - protein, 40 aa, Artificial Sequence
  Description of Artificial Sequence: Synthetic polypeptide
EDIHHYREQIKRVKDSEDVPMVLVGNNCDLPSRTVDTKQA

SEQ ID NO: 976 - protein, 40 aa, Artificial Sequence
  Description of Artificial Sequence: Synthetic polypeptide
DIHHYREQIKRVKDSEDVPMVLVGNNCDLPSRTVDTKQAQ

SEQ ID NO: 977 - protein, 40 aa, Artificial Sequence
  Description of Artificial Sequence: Synthetic polypeptide
IHHYREQIKRVKDSEDVPMVLVGNNCDLPSRTVDTKQAQD

SEQ ID NO: 978 - protein, 40 aa, Artificial Sequence
  Description of Artificial Sequence: Synthetic polypeptide
HHYREQIKRVKDSEDVPMVLVGNNCDLPSRTVDTKQAQDL

SEQ ID NO: 979 - protein, 40 aa, Artificial Sequence
  Description of Artificial Sequence: Synthetic polypeptide
YREQIKRVKDSEDVPMVLVGNNCDLPSRTVDTKQAQDLAR

SEQ ID NO: 980 - protein, 40 aa, Artificial Sequence
  Description of Artificial Sequence: Synthetic polypeptide
REQIKRVKDSEDVPMVLVGNNCDLPSRTVDTKQAQDLARS

SEQ ID NO: 981 - protein, 40 aa, Artificial Sequence
  Description of Artificial Sequence: Synthetic polypeptide
RVKDSEDVPMVLVGNNCDLPSRTVDTKQAQDLARSYGIPF

SEQ ID NO: 982 - protein, 40 aa, Artificial Sequence
  Description of Artificial Sequence: Synthetic polypeptide
VVGARGVGKSALTIQLIQNHFVDEYDPTIEDSYRKQVVID

SEQ ID NO: 983 - protein, 40 aa, Artificial Sequence; identical to SEQ ID NO: 880
  Description of Artificial Sequence: Synthetic polypeptide

SEQ ID NO: 984 - protein, 40 aa, Artificial Sequence
  Description of Artificial Sequence: Synthetic polypeptide
TEYKLVVVGAGGIGKSALTIQLIQNHFVDEYDPTIEDSYR

SEQ ID NO: 985 - protein, 40 aa, Artificial Sequence
  Description of Artificial Sequence: Synthetic polypeptide
YKLVVVGAGGIGKSALTIQLIQNHFVDEYDPTIEDSYRKQ

SEQ ID NO: 986 - protein, 40 aa, Artificial Sequence
  Description of Artificial Sequence: Synthetic polypeptide
GKSAFTIQLIQNHFVDEYDPTIEDSYRKQVVIDGETCLLD

SEQ ID NO: 987 - protein, 40 aa, Artificial Sequence
  Description of Artificial Sequence: Synthetic polypeptide
AFTIQLIQNHFVDEYDPTIEDSYRKQVVIDGETCLLDILD

SEQ ID NO: 988 - protein, 40 aa, Artificial Sequence
  Description of Artificial Sequence: Synthetic polypeptide
LVVVGAGGVGKSALRIQLIQNHFVDEYDPTIEDSYRKQVV

SEQ ID NO: 989 - protein, 40 aa, Artificial Sequence
  Description of Artificial Sequence: Synthetic polypeptide
GKSALTRQLIQNHFVDEYDPTIEDSYRKQVVIDGETCLLD

SEQ ID NO: 990 - protein, 40 aa, Artificial Sequence
  Description of Artificial Sequence: Synthetic polypeptide
TEYKLVVVGAGGVGKSALTIQLIQNHFVDEYDLTIEDSYR

SEQ ID NO: 991 - protein, 40 aa, Artificial Sequence
  Description of Artificial Sequence: Synthetic polypeptide
KLVVVGAGGVGKSALTIQLIQNHFVDEYDLTIEDSYRKQV

SEQ ID NO: 992 - protein, 40 aa, Artificial Sequence
  Description of Artificial Sequence: Synthetic polypeptide
VVGAGGVGKSALTIQLIQNHFVDEYDLTIEDSYRKQVVID

SEQ ID NO: 993 - protein, 40 aa, Artificial Sequence
  Description of Artificial Sequence: Synthetic polypeptide
ALTIQLIQNHFVDEYDLTIEDSYRKQVVIDGETCLLDILD

SEQ ID NO: 994 - protein, 40 aa, Artificial Sequence
  Description of Artificial Sequence: Synthetic polypeptide
VDEYDLTIEDSYRKQVVIDGETCLLDILDTAGQEEYSAMR

SEQ ID NO: 995 - protein, 40 aa, Artificial Sequence
  Description of Artificial Sequence: Synthetic polypeptide
VDEYDPTIEDSYRKQVVIDGETCLLDILDTGGQEEYSAMR

SEQ ID NO: 996 - protein, 40 aa, Artificial Sequence
  Description of Artificial Sequence: Synthetic polypeptide
IDGETCLLDILDTGGQEEYSAMRDQYMRTGEGFLCVFAIN

SEQ ID NO: 997 - protein, 40 aa, Artificial Sequence
  Description of Artificial Sequence: Synthetic polypeptide
CLLDILDTGGQEEYSAMRDQYMRTGEGFLCVFAINNTKSF

SEQ ID NO: 998 - protein, 40 aa, Artificial Sequence
  Description of Artificial Sequence: Synthetic polypeptide
LDTGGQEEYSAMRDQYMRTGEGFLCVFAINNTKSFEDIHH

SEQ ID NO: 999 - protein, 40 aa, Artificial Sequence
  Description of Artificial Sequence: Synthetic polypeptide
TGGQEEYSAMRDQYMRTGEGFLCVFAINNTKSFEDIHHYR

SEQ ID NO: 1000 - protein, 40 aa, Artificial Sequence
  Description of Artificial Sequence: Synthetic polypeptide
NHFVDEYDPTIEDSYRKQVVIDGETCLLDILDTTGQEEYS

SEQ ID NO: 1001 - protein, 40 aa, Artificial Sequence
  Description of Artificial Sequence: Synthetic polypeptide
VDEYDPTIEDSYRKQVVIDGETCLLDILDTTGQEEYSAMR

SEQ ID NO: 1002 - protein, 40 aa, Artificial Sequence
  Description of Artificial Sequence: Synthetic polypeptide
TCLLDILDTTGQEEYSAMRDQYMRTGEGFLCVFAINNTKS

SEQ ID NO: 1003 - protein, 40 aa, Artificial Sequence
  Description of Artificial Sequence: Synthetic polypeptide
LLDILDTTGQEEYSAMRDQYMRTGEGFLCVFAINNTKSFE

SEQ ID NO: 1004 - protein, 40 aa, Artificial Sequence
  Description of Artificial Sequence: Synthetic polypeptide
TTGQEEYSAMRDQYMRTGEGFLCVFAINNTKSFEDIHHYR

SEQ ID NO: 1005 - protein, 40 aa, Artificial Sequence
  Description of Artificial Sequence: Synthetic polypeptide
TGQEEYSAMRDQYMRTGEGFLCVFAINNTKSFEDIHHYRE

SEQ ID NO: 1006 - protein, 40 aa, Artificial Sequence
  Description of Artificial Sequence: Synthetic polypeptide
QLIQNHFVDEYDPTIEDSYRKQVVIDGETCLLDILDTAGK

SEQ ID NO: 1007 - protein, 40 aa, Artificial Sequence
  Description of Artificial Sequence: Synthetic polypeptide
LIQNHFVDEYDPTIEDSYRKQVVIDGETCLLDILDTAGKE

SEQ ID NO: 1008 - protein, 40 aa, Artificial Sequence
  Description of Artificial Sequence: Synthetic polypeptide
IQNHFVDEYDPTIEDSYRKQVVIDGETCLLDILDTAGKEE

SEQ ID NO: 1009 - protein, 40 aa, Artificial Sequence
  Description of Artificial Sequence: Synthetic polypeptide
NHFVDEYDPTIEDSYRKQVVIDGETCLLDILDTAGKEEYS

SEQ ID NO: 1010 - protein, 40 aa, Artificial Sequence
  Description of Artificial Sequence: Synthetic polypeptide
VDEYDPTIEDSYRKQVVIDGETCLLDILDTAGKEEYSAMR

SEQ ID NO: 1011 - protein, 40 aa, Artificial Sequence
  Description of Artificial Sequence: Synthetic polypeptide
TIEDSYRKQVVIDGETCLLDILDTAGKEEYSAMRDQYMRT

SEQ ID NO: 1012 - protein, 40 aa, Artificial Sequence
  Description of Artificial Sequence: Synthetic polypeptide
EDSYRKQVVIDGETCLLDILDTAGKEEYSAMRDQYMRTGE

SEQ ID NO: 1013 - protein, 40 aa, Artificial Sequence
  Description of Artificial Sequence: Synthetic polypeptide
RKQVVIDGETCLLDILDTAGKEEYSAMRDQYMRTGEGFLC

SEQ ID NO: 1014 - protein, 40 aa, Artificial Sequence
  Description of Artificial Sequence: Synthetic polypeptide
KQVVIDGETCLLDILDTAGKEEYSAMRDQYMRTGEGFLCV

SEQ ID NO: 1015 - protein, 40 aa, Artificial Sequence
  Description of Artificial Sequence: Synthetic polypeptide
QVVIDGETCLLDILDTAGKEEYSAMRDQYMRTGEGFLCVF

SEQ ID NO: 1016 - protein, 40 aa, Artificial Sequence
  Description of Artificial Sequence: Synthetic polypeptide
VVIDGETCLLDILDTAGKEEYSAMRDQYMRTGEGFLCVFA

SEQ ID NO: 1017 - protein, 40 aa, Artificial Sequence
  Description of Artificial Sequence: Synthetic polypeptide
DGETCLLDILDTAGKEEYSAMRDQYMRTGEGFLCVFAINN

SEQ ID NO: 1018 - protein, 40 aa, Artificial Sequence
  Description of Artificial Sequence: Synthetic polypeptide
CLLDILDTAGKEEYSAMRDQYMRTGEGFLCVFAINNTKSF

SEQ ID NO: 1019 - protein, 40 aa, Artificial Sequence
  Description of Artificial Sequence: Synthetic polypeptide
LLDILDTAGKEEYSAMRDQYMRTGEGFLCVFAINNTKSFE

SEQ ID NO: 1020 - protein, 40 aa, Artificial Sequence
  Description of Artificial Sequence: Synthetic polypeptide
ILDTAGKEEYSAMRDQYMRTGEGFLCVFAINNTKSFEDIH

SEQ ID NO: 1021 - protein, 40 aa, Artificial Sequence
  Description of Artificial Sequence: Synthetic polypeptide
DTAGKEEYSAMRDQYMRTGEGFLCVFAINNTKSFEDIHHY

SEQ ID NO: 1022 - protein, 40 aa, Artificial Sequence
  Description of Artificial Sequence: Synthetic polypeptide
TAGKEEYSAMRDQYMRTGEGFLCVFAINNTKSFEDIHHYR

SEQ ID NO: 1023 - protein, 40 aa, Artificial Sequence
  Description of Artificial Sequence: Synthetic polypeptide
KEEYSAMRDQYMRTGEGFLCVFAINNTKSFEDIHHYREQI

SEQ ID NO: 1024 - protein, 40 aa, Artificial Sequence
  Description of Artificial Sequence: Synthetic polypeptide
QLIQNHFVDEYDPTIEDSYRKQVVIDGETCLLDILDTAGR

SEQ ID NO: 1025 - protein, 40 aa, Artificial Sequence
  Description of Artificial Sequence: Synthetic polypeptide
RKQVVIDGETCLLDILDTAGREEYSAMRDQYMRTGEGFLC

SEQ ID NO: 1026 - protein, 40 aa, Artificial Sequence
  Description of Artificial Sequence: Synthetic polypeptide
KQVVIDGETCLLDILDTAGREEYSAMRDQYMRTGEGFLCV

SEQ ID NO: 1027 - protein, 40 aa, Artificial Sequence
  Description of Artificial Sequence: Synthetic polypeptide
VIDGETCLLDILDTAGREEYSAMRDQYMRTGEGFLCVFAI

SEQ ID NO: 1028 - protein, 40 aa, Artificial Sequence
  Description of Artificial Sequence: Synthetic polypeptide
GETCLLDILDTAGREEYSAMRDQYMRTGEGFLCVFAINNT

SEQ ID NO: 1029 - protein, 40 aa, Artificial Sequence
  Description of Artificial Sequence: Synthetic polypeptide
LLDILDTAGREEYSAMRDQYMRTGEGFLCVFAINNTKSFE

SEQ ID NO: 1030 - protein, 40 aa, Artificial Sequence
  Description of Artificial Sequence: Synthetic polypeptide
LDTAGREEYSAMRDQYMRTGEGFLCVFAINNTKSFEDIHH

SEQ ID NO: 1031 - protein, 40 aa, Artificial Sequence
  Description of Artificial Sequence: Synthetic polypeptide
TAGREEYSAMRDQYMRTGEGFLCVFAINNTKSFEDIHHYR

SEQ ID NO: 1032 - protein, 40 aa, Artificial Sequence
  Description of Artificial Sequence: Synthetic polypeptide
AGREEYSAMRDQYMRTGEGFLCVFAINNTKSFEDIHHYRE

SEQ ID NO: 1033 - protein, 40 aa, Artificial Sequence
  Description of Artificial Sequence: Synthetic polypeptide
REEYSAMRDQYMRTGEGFLCVFAINNTKSFEDIHHYREQI

SEQ ID NO: 1034 - protein, 40 aa, Artificial Sequence
  Description of Artificial Sequence: Synthetic polypeptide
VVIDGETCLLDILDTAGQKEYSAMRDQYMRTGEGFLCVFA

SEQ ID NO: 1035 - protein, 40 aa, Artificial Sequence
  Description of Artificial Sequence: Synthetic polypeptide
IDGETCLLDILDTAGQKEYSAMRDQYMRTGEGFLCVFAIN

SEQ ID NO: 1036 - protein, 40 aa, Artificial Sequence
  Description of Artificial Sequence: Synthetic polypeptide
GETCLLDILDTAGQKEYSAMRDQYMRTGEGFLCVFAINNT

SEQ ID NO: 1037 - protein, 40 aa, Artificial Sequence
  Description of Artificial Sequence: Synthetic polypeptide
CLLDILDTAGQKEYSAMRDQYMRTGEGFLCVFAINNTKSF

SEQ ID NO: 1038 - protein, 40 aa, Artificial Sequence
  Description of Artificial Sequence: Synthetic polypeptide
LDILDTAGQKEYSAMRDQYMRTGEGFLCVFAINNTKSFED

SEQ ID NO: 1039 - protein, 40 aa, Artificial Sequence
  Description of Artificial Sequence: Synthetic polypeptide
ILDTAGQKEYSAMRDQYMRTGEGFLCVFAINNTKSFEDIH

SEQ ID NO: 1040 - protein, 40 aa, Artificial Sequence
  Description of Artificial Sequence: Synthetic polypeptide
LDTAGQKEYSAMRDQYMRTGEGFLCVFAINNTKSFEDIHH

SEQ ID NO: 1041 - protein, 40 aa, Artificial Sequence
  Description of Artificial Sequence: Synthetic polypeptide
QKEYSAMRDQYMRTGEGFLCVFAINNTKSFEDIHHYREQI

SEQ ID NO: 1042 - protein, 40 aa, Artificial Sequence
  Description of Artificial Sequence: Synthetic polypeptide
NHFVDEYDPTIEDSYRKQVVIDGETCLLDILDTAGQEKYS

SEQ ID NO: 1043 - protein, 40 aa, Artificial Sequence
  Description of Artificial Sequence: Synthetic polypeptide
FVDEYDPTIEDSYRKQVVIDGETCLLDILDTAGQEKYSAM

SEQ ID NO: 1044 - protein, 40 aa, Artificial Sequence
  Description of Artificial Sequence: Synthetic polypeptide
DPTIEDSYRKQVVIDGETCLLDILDTAGQEKYSAMRDQYM

SEQ ID NO: 1045 - protein, 40 aa, Artificial Sequence
  Description of Artificial Sequence: Synthetic polypeptide
KQVVIDGETCLLDILDTAGQEKYSAMRDQYMRTGEGFLCV

SEQ ID NO: 1046 - protein, 40 aa, Artificial Sequence
  Description of Artificial Sequence: Synthetic polypeptide
DGETCLLDILDTAGQEKYSAMRDQYMRTGEGFLCVFAINN

SEQ ID NO: 1047 - protein, 40 aa, Artificial Sequence
  Description of Artificial Sequence: Synthetic polypeptide
ETCLLDILDTAGQEKYSAMRDQYMRTGEGFLCVFAINNTK

SEQ ID NO: 1048 - protein, 40 aa, Artificial Sequence
  Description of Artificial Sequence: Synthetic polypeptide
TCLLDILDTAGQEKYSAMRDQYMRTGEGFLCVFAINNTKS

SEQ ID NO: 1049 - protein, 40 aa, Artificial Sequence
  Description of Artificial Sequence: Synthetic polypeptide
CLLDILDTAGQEKYSAMRDQYMRTGEGFLCVFAINNTKSF

SEQ ID NO: 1050 - protein, 40 aa, Artificial Sequence
  Description of Artificial Sequence: Synthetic polypeptide
LLDILDTAGQEKYSAMRDQYMRTGEGFLCVFAINNTKSFE

SEQ ID NO: 1051 - protein, 40 aa, Artificial Sequence
  Description of Artificial Sequence: Synthetic polypeptide
TAGQEKYSAMRDQYMRTGEGFLCVFAINNTKSFEDIHHYR

SEQ ID NO: 1052 - protein, 40 aa, Artificial Sequence
  Description of Artificial Sequence: Synthetic polypeptide
QEKYSAMRDQYMRTGEGFLCVFAINNTKSFEDIHHYREQI

SEQ ID NO: 1053 - protein, 40 aa, Artificial Sequence
  Description of Artificial Sequence: Synthetic polypeptide
VLHERNSPYIVGFYGAFYSDGEISICMEHMDGGSLDQVLK

SEQ ID NO: 1054 - protein, 40 aa, Artificial Sequence
  Description of Artificial Sequence: Synthetic polypeptide
MARKLIHLEIKPAIRNQIIRELQVLHECNSLYIVGFYGAF

SEQ ID NO: 1055 - protein, 40 aa, Artificial Sequence
  Description of Artificial Sequence: Synthetic polypeptide
IRELQVLHECNSLYIVGFYGAFYSDGEISICMEHMDGGSL

SEQ ID NO: 1056 - protein, 40 aa, Artificial Sequence
  Description of Artificial Sequence: Synthetic polypeptide
ELQVLHECNSLYIVGFYGAFYSDGEISICMEHMDGGSLDQ

SEQ ID NO: 1057 - protein, 40 aa, Artificial Sequence
  Description of Artificial Sequence: Synthetic polypeptide
CNSLYIVGFYGAFYSDGEISICMEHMDGGSLDQVLKKAGR

SEQ ID NO: 1058 - protein, 40 aa, Artificial Sequence
  Description of Artificial Sequence: Synthetic polypeptide
GLVMARKLIHLEIKPAIRNQIIRELQVLHECNSSYIVGFY

SEQ ID NO: 1059 - protein, 40 aa, Artificial Sequence
  Description of Artificial Sequence: Synthetic polypeptide
NSSYIVGFYGAFYSDGEISICMEHMDGGSLDQVLKKAGRI

SEQ ID NO: 1060 - protein, 40 aa, Artificial Sequence
  Description of Artificial Sequence: Synthetic polypeptide
LIVHFNEVIGRGHFGCVYHGTLLDNDGKKIHCAVISLNRI

SEQ ID NO: 1061 - protein, 40 aa, Artificial Sequence
  Description of Artificial Sequence: Synthetic polypeptide
HFNEVIGRGHFGCVYHGTLLDNDGKKIHCAVISLNRITDI

SEQ ID NO: 1062 - protein, 40 aa, Artificial Sequence
  Description of Artificial Sequence: Synthetic polypeptide
RNCMLDEKFTVKVADFGLARDMYDKEYYSVHNKTGAKLHV

SEQ ID NO: 1063 - protein, 40 aa, Artificial Sequence
  Description of Artificial Sequence: Synthetic polypeptide
MLDEKFTVKVADFGLARDMYDKEYYSVHNKTGAKLHVKWM

SEQ ID NO: 1064 - protein, 40 aa, Artificial Sequence
  Description of Artificial Sequence: Synthetic polypeptide
ADFGLARDMYDKEYYSVHNKTGAKLHVKWMALESLQTQKF

SEQ ID NO: 1065 - protein, 40 aa, Artificial Sequence
  Description of Artificial Sequence: Synthetic polypeptide
MYDKEYYSVHNKTGAKLPVCWMALESLQTQKFTTKSDVWS

SEQ ID NO: 1066 - protein, 40 aa, Artificial Sequence
  Description of Artificial Sequence: Synthetic polypeptide
YDKEYYSVHNKTGAKLPVCWMALESLQTQKFTTKSDVWSF

SEQ ID NO: 1067 - protein, 40 aa, Artificial Sequence
  Description of Artificial Sequence: Synthetic polypeptide
MLDEKFTVKVADFGLARDMYDKEYYSVHNKTGAKLPVHWM

SEQ ID NO: 1068 - protein, 40 aa, Artificial Sequence
  Description of Artificial Sequence: Synthetic polypeptide
VADFGLARDMYDKEYYSVHNKTGAKLPVHWMALESLQTQK

SEQ ID NO: 1069 - protein, 40 aa, Artificial Sequence
  Description of Artificial Sequence: Synthetic polypeptide
ADFGLARDMYDKEYYSVHNKTGAKLPVHWMALESLQTQKF

SEQ ID NO: 1070 - protein, 40 aa, Artificial Sequence
  Description of Artificial Sequence: Synthetic polypeptide
ARDMYDKEYYSVHNKTGAKLPVHWMALESLQTQKFTTKSD

SEQ ID NO: 1071 - protein, 40 aa, Artificial Sequence
  Description of Artificial Sequence: Synthetic polypeptide
RDMYDKEYYSVHNKTGAKLPVHWMALESLQTQKFTTKSDV

SEQ ID NO: 1072 - protein, 40 aa, Artificial Sequence
  Description of Artificial Sequence: Synthetic polypeptide
LTDIGRYHPQALIYPLTVASESTTTARHNAANKILKNMCE

SEQ ID NO: 1073 - protein, 40 aa, Artificial Sequence
  Description of Artificial Sequence: Synthetic polypeptide
LTVASESTTTARHNAANKILKNMCEHSNTLVQQAMMVSEE

SEQ ID NO: 1074 - protein, 40 aa, Artificial Sequence
  Description of Artificial Sequence: Synthetic polypeptide
GSNGHEFVFLLKGHEDLRQDERVMQLFGLVNTLLANDPTF

SEQ ID NO: 1075 - protein, 40 aa, Artificial Sequence
  Description of Artificial Sequence: Synthetic polypeptide
LKGHEDLRQDERVMQLFGLVNTLLANDPTFLRKNLSIQRY

SEQ ID NO: 1076 - protein, 40 aa, Artificial Sequence
  Description of Artificial Sequence: Synthetic polypeptide
EVTGLDGNYRITCHTVMEALREHKDSVMAVLEAFVYDPLL

SEQ ID NO: 1077 - protein, 40 aa, Artificial Sequence
  Description of Artificial Sequence: Synthetic polypeptide
LDGNYRITCHTVMEALREHKDSVMAVLEAFVYDPLLNWRL

SEQ ID NO: 1078 - protein, 40 aa, Artificial Sequence
  Description of Artificial Sequence: Synthetic polypeptide
HTVMEALREHKDSVMAVLEAFVYDPLLNWRLMDTNTKGNK

SEQ ID NO: 1079 - protein, 40 aa, Artificial Sequence
  Description of Artificial Sequence: Synthetic polypeptide
TGLDGNYRITCHTVMEMLREHKDSVMAVLEAFVYDPLLNW

SEQ ID NO: 1080 - protein, 40 aa, Artificial Sequence
  Description of Artificial Sequence: Synthetic polypeptide
DGNYRITCHTVMEMLREHKDSVMAVLEAFVYDPLLNWRLM

SEQ ID NO: 1081 - protein, 40 aa, Artificial Sequence
  Description of Artificial Sequence: Synthetic polypeptide
DFSQRRKEYELEKQKKLEKERQEQLQKEQEKAFFAQLQLG

SEQ ID NO: 1082 - protein, 40 aa, Artificial Sequence
  Description of Artificial Sequence: Synthetic polypeptide
FSQRRKEYELEKQKKLEKERQEQLQKEQEKAFFAQLQLGE

SEQ ID NO: 1083 - protein, 40 aa, Artificial Sequence
  Description of Artificial Sequence: Synthetic polypeptide
SQRRKEYELEKQKKLEKERQEQLQKEQEKAFFAQLQLGEE

SEQ ID NO: 1084 - protein, 40 aa, Artificial Sequence
  Description of Artificial Sequence: Synthetic polypeptide
QRRKEYELEKQKKLEKERQEQLQKEQEKAFFAQLQLGEET

SEQ ID NO: 1085 - protein, 40 aa, Artificial Sequence
  Description of Artificial Sequence: Synthetic polypeptide
RRKEYELEKQKKLEKERQEQLQKEQEKAFFAQLQLGEETG

SEQ ID NO: 1086 - protein, 40 aa, Artificial Sequence
  Description of Artificial Sequence: Synthetic polypeptide
RKEYELEKQKKLEKERQEQLQKEQEKAFFAQLQLGEETGE

SEQ ID NO: 1087 - protein, 40 aa, Artificial Sequence
  Description of Artificial Sequence: Synthetic polypeptide
KEYELEKQKKLEKERQEQLQKEQEKAFFAQLQLGEETGEF

SEQ ID NO: 1088 - protein, 40 aa, Artificial Sequence
  Description of Artificial Sequence: Synthetic polypeptide
EYELEKQKKLEKERQEQLQKEQEKAFFAQLQLGEETGEFL

SEQ ID NO: 1089 - protein, 40 aa, Artificial Sequence
  Description of Artificial Sequence: Synthetic polypeptide
YELEKQKKLEKERQEQLQKEQEKAFFAQLQLGEETGEFLP

SEQ ID NO: 1090 - protein, 40 aa, Artificial Sequence
  Description of Artificial Sequence: Synthetic polypeptide
ELEKQKKLEKERQEQLQKEQEKAFFAQLQLGEETGEFLPI

SEQ ID NO: 1091 - protein, 40 aa, Artificial Sequence
  Description of Artificial Sequence: Synthetic polypeptide
LEKQKKLEKERQEQLQKEQEKAFFAQLQLGEETGEFLPIQ

SEQ ID NO: 1092 - protein, 40 aa, Artificial Sequence
  Description of Artificial Sequence: Synthetic polypeptide
EKQKKLEKERQEQLQKEQEKAFFAQLQLGEETGEFLPIQP

SEQ ID NO: 1093 - protein, 40 aa, Artificial Sequence
  Description of Artificial Sequence: Synthetic polypeptide
KQKKLEKERQEQLQKEQEKAFFAQLQLGEETGEFLPIQPA

SEQ ID NO: 1094 - protein, 40 aa, Artificial Sequence
  Description of Artificial Sequence: Synthetic polypeptide
KERQEQLQKEQEKAFFAQLQLGEETGEFLPIQPAQHIQSE

SEQ ID NO: 1095 - protein, 40 aa, Artificial Sequence
  Description of Artificial Sequence: Synthetic polypeptide
EQLQKEQEKAFFAQLQLGEETGEFLPIQPAQHIQSETSGS

SEQ ID NO: 1096 - protein, 40 aa, Artificial Sequence
  Description of Artificial Sequence: Synthetic polypeptide
SQRRKEYELEKQKKLEKERQEQLQKEQEKAFFAQLQLDEG

SEQ ID NO: 1097 - protein, 40 aa, Artificial Sequence
  Description of Artificial Sequence: Synthetic polypeptide
QRRKEYELEKQKKLEKERQEQLQKEQEKAFFAQLQLDEGT

SEQ ID NO: 1098 - protein, 40 aa, Artificial Sequence
  Description of Artificial Sequence: Synthetic polypeptide
RRKEYELEKQKKLEKERQEQLQKEQEKAFFAQLQLDEGTG

SEQ ID NO: 1099 - protein, 40 aa, Artificial Sequence
  Description of Artificial Sequence: Synthetic polypeptide
RKEYELEKQKKLEKERQEQLQKEQEKAFFAQLQLDEGTGE

SEQ ID NO: 1100 - protein, 40 aa, Artificial Sequence
  Description of Artificial Sequence: Synthetic polypeptide
KEYELEKQKKLEKERQEQLQKEQEKAFFAQLQLDEGTGEF

SEQ ID NO: 1101 - protein, 40 aa, Artificial Sequence
  Description of Artificial Sequence: Synthetic polypeptide
EYELEKQKKLEKERQEQLQKEQEKAFFAQLQLDEGTGEFL

SEQ ID NO: 1102 - protein, 40 aa, Artificial Sequence
  Description of Artificial Sequence: Synthetic polypeptide
YELEKQKKLEKERQEQLQKEQEKAFFAQLQLDEGTGEFLP

SEQ ID NO: 1103 - protein, 40 aa, Artificial Sequence
  Description of Artificial Sequence: Synthetic polypeptide
ELEKQKKLEKERQEQLQKEQEKAFFAQLQLDEGTGEFLPI

SEQ ID NO: 1104 - protein, 40 aa, Artificial Sequence
  Description of Artificial Sequence: Synthetic polypeptide
LEKQKKLEKERQEQLQKEQEKAFFAQLQLDEGTGEFLPIQ

SEQ ID NO: 1105 - protein, 40 aa, Artificial Sequence
  Description of Artificial Sequence: Synthetic polypeptide
EKQKKLEKERQEQLQKEQEKAFFAQLQLDEGTGEFLPIQP

SEQ ID NO: 1106 - protein, 40 aa, Artificial Sequence
  Description of Artificial Sequence: Synthetic polypeptide
KQKKLEKERQEQLQKEQEKAFFAQLQLDEGTGEFLPIQPA

SEQ ID NO: 1107 - protein, 40 aa, Artificial Sequence
  Description of Artificial Sequence: Synthetic polypeptide
KKLEKERQEQLQKEQEKAFFAQLQLDEGTGEFLPIQPAQH

SEQ ID NO: 1108 - protein, 40 aa, Artificial Sequence
  Description of Artificial Sequence: Synthetic polypeptide
QRRKEYELEKQKKLEKERQEQLQKEQEKAFFAQLQLDEQT

SEQ ID NO: 1109 - protein, 40 aa, Artificial Sequence
  Description of Artificial Sequence: Synthetic polypeptide
RRKEYELEKQKKLEKERQEQLQKEQEKAFFAQLQLDEQTG

SEQ ID NO: 1110 - protein, 40 aa, Artificial Sequence
  Description of Artificial Sequence: Synthetic polypeptide
RKEYELEKQKKLEKERQEQLQKEQEKAFFAQLQLDEQTGE

SEQ ID NO: 1111 - protein, 40 aa, Artificial Sequence
  Description of Artificial Sequence: Synthetic polypeptide
KEYELEKQKKLEKERQEQLQKEQEKAFFAQLQLDEQTGEF

SEQ ID NO: 1112 - protein, 40 aa, Artificial Sequence
  Description of Artificial Sequence: Synthetic polypeptide
EYELEKQKKLEKERQEQLQKEQEKAFFAQLQLDEQTGEFL

SEQ ID NO: 1113 - protein, 40 aa, Artificial Sequence
  Description of Artificial Sequence: Synthetic polypeptide
YELEKQKKLEKERQEQLQKEQEKAFFAQLQLDEQTGEFLP

SEQ ID NO: 1114 - protein, 40 aa, Artificial Sequence
  Description of Artificial Sequence: Synthetic polypeptide
ELEKQKKLEKERQEQLQKEQEKAFFAQLQLDEQTGEFLPI

SEQ ID NO: 1115 - protein, 40 aa, Artificial Sequence
  Description of Artificial Sequence: Synthetic polypeptide
LEKQKKLEKERQEQLQKEQEKAFFAQLQLDEQTGEFLPIQ

SEQ ID NO: 1116 - protein, 40 aa, Artificial Sequence
  Description of Artificial Sequence: Synthetic polypeptide
EKQKKLEKERQEQLQKEQEKAFFAQLQLDEQTGEFLPIQP

SEQ ID NO: 1117 - protein, 40 aa, Artificial Sequence
  Description of Artificial Sequence: Synthetic polypeptide
KQKKLEKERQEQLQKEQEKAFFAQLQLDEQTGEFLPIQPA

SEQ ID NO: 1118 - protein, 40 aa, Artificial Sequence
  Description of Artificial Sequence: Synthetic polypeptide
QKKLEKERQEQLQKEQEKAFFAQLQLDEQTGEFLPIQPAQ

SEQ ID NO: 1119 - protein, 40 aa, Artificial Sequence
  Description of Artificial Sequence: Synthetic polypeptide
QLQLDEQTGEFLPIQPAQHIQSETSGSANYSQVAHIPKSD

SEQ ID NO: 1120 - protein, 40 aa, Artificial Sequence
  Description of Artificial Sequence: Synthetic polypeptide
QRRKEYELEKQKKLEKERQEQLQKEQEKAFFAQLQLDEEA

SEQ ID NO: 1121 - protein, 40 aa, Artificial Sequence
  Description of Artificial Sequence: Synthetic polypeptide
RRKEYELEKQKKLEKERQEQLQKEQEKAFFAQLQLDEEAG

SEQ ID NO: 1122 - protein, 40 aa, Artificial Sequence
  Description of Artificial Sequence: Synthetic polypeptide
RKEYELEKQKKLEKERQEQLQKEQEKAFFAQLQLDEEAGE

SEQ ID NO: 1123 - protein, 40 aa, Artificial Sequence
  Description of Artificial Sequence: Synthetic polypeptide
KEYELEKQKKLEKERQEQLQKEQEKAFFAQLQLDEEAGEF

SEQ ID NO: 1124 - protein, 40 aa, Artificial Sequence
  Description of Artificial Sequence: Synthetic polypeptide
EYELEKQKKLEKERQEQLQKEQEKAFFAQLQLDEEAGEFL

SEQ ID NO: 1125 - protein, 40 aa, Artificial Sequence
  Description of Artificial Sequence: Synthetic polypeptide
YELEKQKKLEKERQEQLQKEQEKAFFAQLQLDEEAGEFLP

SEQ ID NO: 1126 - protein, 40 aa, Artificial Sequence
  Description of Artificial Sequence: Synthetic polypeptide
ELEKQKKLEKERQEQLQKEQEKAFFAQLQLDEEAGEFLPI

SEQ ID NO: 1127 - protein, 40 aa, Artificial Sequence
  Description of Artificial Sequence: Synthetic polypeptide
LEKQKKLEKERQEQLQKEQEKAFFAQLQLDEEAGEFLPIQ

SEQ ID NO: 1128 - protein, 40 aa, Artificial Sequence
  Description of Artificial Sequence: Synthetic polypeptide
EKQKKLEKERQEQLQKEQEKAFFAQLQLDEEAGEFLPIQP

SEQ ID NO: 1129 - protein, 40 aa, Artificial Sequence
  Description of Artificial Sequence: Synthetic polypeptide
KQKKLEKERQEQLQKEQEKAFFAQLQLDEEAGEFLPIQPA

SEQ ID NO: 1130 - protein, 40 aa, Artificial Sequence
  Description of Artificial Sequence: Synthetic polypeptide
QKKLEKERQEQLQKEQEKAFFAQLQLDEEAGEFLPIQPAQ

SEQ ID NO: 1131 - protein, 40 aa, Artificial Sequence
  Description of Artificial Sequence: Synthetic polypeptide
KKLEKERQEQLQKEQEKAFFAQLQLDEEAGEFLPIQPAQH

SEQ ID NO: 1132 - protein, 40 aa, Artificial Sequence
  Description of Artificial Sequence: Synthetic polypeptide
QRRKEYELEKQKKLEKERQEQLQKEQEKAFFAQLQLDEEI

SEQ ID NO: 1133 - protein, 40 aa, Artificial Sequence
  Description of Artificial Sequence: Synthetic polypeptide
RRKEYELEKQKKLEKERQEQLQKEQEKAFFAQLQLDEEIG

SEQ ID NO: 1134 - protein, 40 aa, Artificial Sequence
  Description of Artificial Sequence: Synthetic polypeptide
RKEYELEKQKKLEKERQEQLQKEQEKAFFAQLQLDEEIGE

SEQ ID NO: 1135 - protein, 40 aa, Artificial Sequence
  Description of Artificial Sequence: Synthetic polypeptide
KEYELEKQKKLEKERQEQLQKEQEKAFFAQLQLDEEIGEF

SEQ ID NO: 1136 - protein, 40 aa, Artificial Sequence
  Description of Artificial Sequence: Synthetic polypeptide
EYELEKQKKLEKERQEQLQKEQEKAFFAQLQLDEEIGEFL

SEQ ID NO: 1137 - protein, 40 aa, Artificial Sequence
  Description of Artificial Sequence: Synthetic polypeptide
YELEKQKKLEKERQEQLQKEQEKAFFAQLQLDEEIGEFLP

SEQ ID NO: 1138 - protein, 40 aa, Artificial Sequence
  Description of Artificial Sequence: Synthetic polypeptide
ELEKQKKLEKERQEQLQKEQEKAFFAQLQLDEEIGEFLPI

SEQ ID NO: 1139 - protein, 40 aa, Artificial Sequence
  Description of Artificial Sequence: Synthetic polypeptide
LEKQKKLEKERQEQLQKEQEKAFFAQLQLDEEIGEFLPIQ

SEQ ID NO: 1140 - protein, 40 aa, Artificial Sequence
  Description of Artificial Sequence: Synthetic polypeptide
EKQKKLEKERQEQLQKEQEKAFFAQLQLDEEIGEFLPIQP

SEQ ID NO: 1141 - protein, 40 aa, Artificial Sequence
  Description of Artificial Sequence: Synthetic polypeptide
KQKKLEKERQEQLQKEQEKAFFAQLQLDEEIGEFLPIQPA

SEQ ID NO: 1142 - protein, 40 aa, Artificial Sequence
  Description of Artificial Sequence: Synthetic polypeptide
KKLEKERQEQLQKEQEKAFFAQLQLDEEIGEFLPIQPAQH

SEQ ID NO: 1143 - protein, 40 aa, Artificial Sequence
  Description of Artificial Sequence: Synthetic polypeptide
RRKEYELEKQKKLEKERQEQLQKEQEKAFFAQLQLDEETS

SEQ ID NO: 1144 - protein, 40 aa, Artificial Sequence
  Description of Artificial Sequence: Synthetic polypeptide
RKEYELEKQKKLEKERQEQLQKEQEKAFFAQLQLDEETSE

SEQ ID NO: 1145 - protein, 40 aa, Artificial Sequence
  Description of Artificial Sequence: Synthetic polypeptide
KEYELEKQKKLEKERQEQLQKEQEKAFFAQLQLDEETSEF

SEQ ID NO: 1146 - protein, 40 aa, Artificial Sequence
  Description of Artificial Sequence: Synthetic polypeptide
EYELEKQKKLEKERQEQLQKEQEKAFFAQLQLDEETSEFL

SEQ ID NO: 1147 - protein, 40 aa, Artificial Sequence
  Description of Artificial Sequence: Synthetic polypeptide
YELEKQKKLEKERQEQLQKEQEKAFFAQLQLDEETSEFLP

SEQ ID NO: 1148 - protein, 40 aa, Artificial Sequence
  Description of Artificial Sequence: Synthetic polypeptide
ELEKQKKLEKERQEQLQKEQEKAFFAQLQLDEETSEFLPI

SEQ ID NO: 1149 - protein, 40 aa, Artificial Sequence
  Description of Artificial Sequence: Synthetic polypeptide
LEKQKKLEKERQEQLQKEQEKAFFAQLQLDEETSEFLPIQ

SEQ ID NO: 1150 - protein, 40 aa, Artificial Sequence
  Description of Artificial Sequence: Synthetic polypeptide
EKQKKLEKERQEQLQKEQEKAFFAQLQLDEETSEFLPIQP

SEQ ID NO: 1151 - protein, 40 aa, Artificial Sequence
  Description of Artificial Sequence: Synthetic polypeptide
KQKKLEKERQEQLQKEQEKAFFAQLQLDEETSEFLPIQPA

SEQ ID NO: 1152 - protein, 40 aa, Artificial Sequence
  Description of Artificial Sequence: Synthetic polypeptide
KKLEKERQEQLQKEQEKAFFAQLQLDEETSEFLPIQPAQH

SEQ ID NO: 1153 - protein, 40 aa, Artificial Sequence
  Description of Artificial Sequence: Synthetic polypeptide
RRKEYELEKQKKLEKERQEQLQKEQEKAFFAQLQLDEETV

SEQ ID NO: 1154 - protein, 40 aa, Artificial Sequence
  Description of Artificial Sequence: Synthetic polypeptide
RKEYELEKQKKLEKERQEQLQKEQEKAFFAQLQLDEETVE

SEQ ID NO: 1155 - protein, 40 aa, Artificial Sequence
  Description of Artificial Sequence: Synthetic polypeptide
KEYELEKQKKLEKERQEQLQKEQEKAFFAQLQLDEETVEF

SEQ ID NO: 1156 - protein, 40 aa, Artificial Sequence
  Description of Artificial Sequence: Synthetic polypeptide
EYELEKQKKLEKERQEQLQKEQEKAFFAQLQLDEETVEFL

SEQ ID NO: 1157 - protein, 40 aa, Artificial Sequence
  Description of Artificial Sequence: Synthetic polypeptide
YELEKQKKLEKERQEQLQKEQEKAFFAQLQLDEETVEFLP

SEQ ID NO: 1158 - protein, 40 aa, Artificial Sequence
  Description of Artificial Sequence: Synthetic polypeptide
ELEKQKKLEKERQEQLQKEQEKAFFAQLQLDEETVEFLPI

SEQ ID NO: 1159 - protein, 40 aa, Artificial Sequence
  Description of Artificial Sequence: Synthetic polypeptide
LEKQKKLEKERQEQLQKEQEKAFFAQLQLDEETVEFLPIQ

SEQ ID NO: 1160 - protein, 40 aa, Artificial Sequence
  Description of Artificial Sequence: Synthetic polypeptide
EKQKKLEKERQEQLQKEQEKAFFAQLQLDEETVEFLPIQP

SEQ ID NO: 1161 - protein, 40 aa, Artificial Sequence
  Description of Artificial Sequence: Synthetic polypeptide
KQKKLEKERQEQLQKEQEKAFFAQLQLDEETVEFLPIQPA

SEQ ID NO: 1162 - protein, 40 aa, Artificial Sequence
  Description of Artificial Sequence: Synthetic polypeptide
KKLEKERQEQLQKEQEKAFFAQLQLDEETVEFLPIQPAQH

SEQ ID NO: 1163 - protein, 40 aa, Artificial Sequence
  Description of Artificial Sequence: Synthetic polypeptide
EKERQEQLQKEQEKAFFAQLQLDEETVEFLPIQPAQHIQS

SEQ ID NO: 1164 - protein, 40 aa, Artificial Sequence
  Description of Artificial Sequence: Synthetic polypeptide
LDEETVEFLPIQPAQHIQSETSGSANYSQVAHIPKSDALY

SEQ ID NO: 1165 - protein, 40 aa, Artificial Sequence
  Description of Artificial Sequence: Synthetic polypeptide
RKEYELEKQKKLEKERQEQLQKEQEKAFFAQLQLDEETGD

SEQ ID NO: 1166 - protein, 40 aa, Artificial Sequence
  Description of Artificial Sequence: Synthetic polypeptide
KEYELEKQKKLEKERQEQLQKEQEKAFFAQLQLDEETGDF

SEQ ID NO: 1167 - protein, 40 aa, Artificial Sequence
  Description of Artificial Sequence: Synthetic polypeptide
EYELEKQKKLEKERQEQLQKEQEKAFFAQLQLDEETGDFL

SEQ ID NO: 1168 - protein, 40 aa, Artificial Sequence
  Description of Artificial Sequence: Synthetic polypeptide
YELEKQKKLEKERQEQLQKEQEKAFFAQLQLDEETGDFLP

SEQ ID NO: 1169 - protein, 40 aa, Artificial Sequence
  Description of Artificial Sequence: Synthetic polypeptide
ELEKQKKLEKERQEQLQKEQEKAFFAQLQLDEETGDFLPI

SEQ ID NO: 1170 - protein, 40 aa, Artificial Sequence
  Description of Artificial Sequence: Synthetic polypeptide
LEKQKKLEKERQEQLQKEQEKAFFAQLQLDEETGDFLPIQ

SEQ ID NO: 1171 - protein, 40 aa, Artificial Sequence
  Description of Artificial Sequence: Synthetic polypeptide
EKQKKLEKERQEQLQKEQEKAFFAQLQLDEETGDFLPIQP

SEQ ID NO: 1172 - protein, 40 aa, Artificial Sequence
  Description of Artificial Sequence: Synthetic polypeptide
KQKKLEKERQEQLQKEQEKAFFAQLQLDEETGDFLPIQPA

SEQ ID NO: 1173 - protein, 40 aa, Artificial Sequence
  Description of Artificial Sequence: Synthetic polypeptide
KKLEKERQEQLQKEQEKAFFAQLQLDEETGDFLPIQPAQH

SEQ ID NO: 1174 - protein, 40 aa, Artificial Sequence
  Description of Artificial Sequence: Synthetic polypeptide
ETGDFLPIQPAQHIQSETSGSANYSQVAHIPKSDALYFDD

SEQ ID NO: 1175 - protein, 40 aa, Artificial Sequence
  Description of Artificial Sequence: Synthetic polypeptide
RKEYELEKQKKLEKERQEQLQKEQEKAFFAQLQLDEETGV

SEQ ID NO: 1176 - protein, 40 aa, Artificial Sequence
  Description of Artificial Sequence: Synthetic polypeptide
KEYELEKQKKLEKERQEQLQKEQEKAFFAQLQLDEETGVF

SEQ ID NO: 1177 - protein, 40 aa, Artificial Sequence
  Description of Artificial Sequence: Synthetic polypeptide
EYELEKQKKLEKERQEQLQKEQEKAFFAQLQLDEETGVFL

SEQ ID NO: 1178 - protein, 40 aa, Artificial Sequence
  Description of Artificial Sequence: Synthetic polypeptide
YELEKQKKLEKERQEQLQKEQEKAFFAQLQLDEETGVFLP

SEQ ID NO: 1179 - protein, 40 aa, Artificial Sequence
  Description of Artificial Sequence: Synthetic polypeptide
ELEKQKKLEKERQEQLQKEQEKAFFAQLQLDEETGVFLPI

SEQ ID NO: 1180 - protein, 40 aa, Artificial Sequence
  Description of Artificial Sequence: Synthetic polypeptide
LEKQKKLEKERQEQLQKEQEKAFFAQLQLDEETGVFLPIQ

SEQ ID NO: 1181 - protein, 40 aa, Artificial Sequence
  Description of Artificial Sequence: Synthetic polypeptide
EKQKKLEKERQEQLQKEQEKAFFAQLQLDEETGVFLPIQP

SEQ ID NO: 1182 - protein, 40 aa, Artificial Sequence
  Description of Artificial Sequence: Synthetic polypeptide
KQKKLEKERQEQLQKEQEKAFFAQLQLDEETGVFLPIQPA

SEQ ID NO: 1183 - protein, 40 aa, Artificial Sequence
  Description of Artificial Sequence: Synthetic polypeptide
KKLEKERQEQLQKEQEKAFFAQLQLDEETGVFLPIQPAQH

SEQ ID NO: 1184 - protein, 40 aa, Artificial Sequence
  Description of Artificial Sequence: Synthetic polypeptide
LGSFECQRLQGYTGPRCEIDVNECVSNPCQNDATCLDQIG

SEQ ID NO: 1185 - protein, 40 aa, Artificial Sequence
  Description of Artificial Sequence: Synthetic polypeptide
CEHAGKCINTLGSFECQCLQGYTGPRYEIDVNECVSNPCQ

SEQ ID NO: 1186 - protein, 40 aa, Artificial Sequence
  Description of Artificial Sequence: Synthetic polypeptide
GSFECQCLQGYTGPRYEIDVNECVSNPCQNDATCLDQIGE

SEQ ID NO: 1187 - protein, 40 aa, Artificial Sequence
  Description of Artificial Sequence: Synthetic polypeptide
QGYTGPRYEIDVNECVSNPCQNDATCLDQIGEFQCICMPG

SEQ ID NO: 1188 - protein, 40 aa, Artificial Sequence
  Description of Artificial Sequence: Synthetic polypeptide
DVGKSALTIQLIQNHFVDEYDPTIEDSYRKQVVIDGETCL

SEQ ID NO: 1189 - protein, 40 aa, Artificial Sequence
  Description of Artificial Sequence: Synthetic polypeptide
YKLVVVGAGRVGKSALTIQLIQNHFVDEYDPTIEDSYRKQ

SEQ ID NO: 1190 - protein, 40 aa, Artificial Sequence; identical to SEQ ID NO: 883
  Description of Artificial Sequence: Synthetic polypeptide

SEQ ID NO: 1191 - protein, 40 aa, Artificial Sequence
  Description of Artificial Sequence: Synthetic polypeptide
VVVGAGGVGNSALTIQLIQNHFVDEYDPTIEDSYRKQVVI

SEQ ID NO: 1192 - protein, 40 aa, Artificial Sequence
  Description of Artificial Sequence: Synthetic polypeptide
VIDGETCLLDILDTAGKEEYSAMRDQYMRTGEGFLCVFAI

SEQ ID NO: 1193 - protein, 40 aa, Artificial Sequence
  Description of Artificial Sequence: Synthetic polypeptide
GKEEYSAMRDQYMRTGEGFLCVFAINNSKSFADINLYREQ

SEQ ID NO: 1194 - protein, 40 aa, Artificial Sequence
  Description of Artificial Sequence: Synthetic polypeptide
DEYDPTIEDSYRKQVVIDGETCLLDILDTAGREEYSAMRD

SEQ ID NO: 1195 - protein, 40 aa, Artificial Sequence
  Description of Artificial Sequence: Synthetic polypeptide
YRKQVVIDGETCLLDILDTAGREEYSAMRDQYMRTGEGFL

SEQ ID NO: 1196 - protein, 40 aa, Artificial Sequence
  Description of Artificial Sequence: Synthetic polypeptide
CLLDILDTAGREEYSAMRDQYMRTGEGFLCVFAINNSKSF

SEQ ID NO: 1197 - protein, 40 aa, Artificial Sequence
  Description of Artificial Sequence: Synthetic polypeptide
QNHFVDEYDPTIEDSYRKQVVIDGETCLLDILDTAGQKEY

SEQ ID NO: 1198 - protein, 40 aa, Artificial Sequence
  Description of Artificial Sequence: Synthetic polypeptide
ISTATPYMNGETSTKSLWVINSALRIKILCATYGNVNIRD

SEQ ID NO: 1199 - protein, 40 aa, Artificial Sequence
  Description of Artificial Sequence: Synthetic polypeptide
TATPYMNGETSTKSLWVINSALRIKILCATYGNVNIRDID

SEQ ID NO: 1200 - protein, 40 aa, Artificial Sequence
  Description of Artificial Sequence: Synthetic polypeptide
TPYMNGETSTKSLWVINSALRIKILCATYGNVNIRDIDKI

SEQ ID NO: 1201 - protein, 40 aa, Artificial Sequence
  Description of Artificial Sequence: Synthetic polypeptide
PYMNGETSTKSLWVINSALRIKILCATYGNVNIRDIDKIY

SEQ ID NO: 1202 - protein, 40 aa, Artificial Sequence
  Description of Artificial Sequence: Synthetic polypeptide
YMNGETSTKSLWVINSALRIKILCATYGNVNIRDIDKIYV

SEQ ID NO: 1203 - protein, 40 aa, Artificial Sequence
  Description of Artificial Sequence: Synthetic polypeptide
ETSTKSLWVINSALRIKILCATYGNVNIRDIDKIYVRTGI

SEQ ID NO: 1204 - protein, 40 aa, Artificial Sequence
  Description of Artificial Sequence: Synthetic polypeptide
VINSALRIKILCATYGNVNIRDIDKIYVRTGIYHGGEPLC

SEQ ID NO: 1205 - protein, 40 aa, Artificial Sequence
  Description of Artificial Sequence: Synthetic polypeptide
CATYGNVNIRDIDKIYVRTGIYHGGEPLCDNVNTQRVPCS

SEQ ID NO: 1206 - protein, 40 aa, Artificial Sequence
  Description of Artificial Sequence: Synthetic polypeptide
ISTATPYMNGETSTKSLWVINSALRIKILCATYMNVNIRD

SEQ ID NO: 1207 - protein, 40 aa, Artificial Sequence
  Description of Artificial Sequence: Synthetic polypeptide
STATPYMNGETSTKSLWVINSALRIKILCATYMNVNIRDI

SEQ ID NO: 1208 - protein, 40 aa, Artificial Sequence
  Description of Artificial Sequence: Synthetic polypeptide
TPYMNGETSTKSLWVINSALRIKILCATYMNVNIRDIDKI

SEQ ID NO: 1209 - protein, 40 aa, Artificial Sequence
  Description of Artificial Sequence: Synthetic polypeptide
PYMNGETSTKSLWVINSALRIKILCATYMNVNIRDIDKIY

SEQ ID NO: 1210 - protein, 40 aa, Artificial Sequence
  Description of Artificial Sequence: Synthetic polypeptide
YMNGETSTKSLWVINSALRIKILCATYMNVNIRDIDKIYV

SEQ ID NO: 1211 - protein, 40 aa, Artificial Sequence
  Description of Artificial Sequence: Synthetic polypeptide
MNGETSTKSLWVINSALRIKILCATYMNVNIRDIDKIYVR

SEQ ID NO: 1212 - protein, 40 aa, Artificial Sequence
  Description of Artificial Sequence: Synthetic polypeptide
GETSTKSLWVINSALRIKILCATYMNVNIRDIDKIYVRTG

SEQ ID NO: 1213 - protein, 40 aa, Artificial Sequence
  Description of Artificial Sequence: Synthetic polypeptide
ETSTKSLWVINSALRIKILCATYMNVNIRDIDKIYVRTGI

SEQ ID NO: 1214 - protein, 40 aa, Artificial Sequence
  Description of Artificial Sequence: Synthetic polypeptide
VINSALRIKILCATYMNVNIRDIDKIYVRTGIYHGGEPLC

SEQ ID NO: 1215 - protein, 40 aa, Artificial Sequence
  Description of Artificial Sequence: Synthetic polypeptide
LRIKILCATYMNVNIRDIDKIYVRTGIYHGGEPLCDNVNT

SEQ ID NO: 1216 - protein, 40 aa, Artificial Sequence
  Description of Artificial Sequence: Synthetic polypeptide
YMNVNIRDIDKIYVRTGIYHGGEPLCDNVNTQRVPCSNPR

SEQ ID NO: 1217 - protein, 40 aa, Artificial Sequence
  Description of Artificial Sequence: Synthetic polypeptide
ISTATPYMNGETSTKSLWVINSALRIKILCATYVIVNIRD

SEQ ID NO: 1218 - protein, 40 aa, Artificial Sequence
  Description of Artificial Sequence: Synthetic polypeptide
TATPYMNGETSTKSLWVINSALRIKILCATYVIVNIRDID

SEQ ID NO: 1219 - protein, 40 aa, Artificial Sequence
  Description of Artificial Sequence: Synthetic polypeptide
ATPYMNGETSTKSLWVINSALRIKILCATYVIVNIRDIDK

SEQ ID NO: 1220 - protein, 40 aa, Artificial Sequence
  Description of Artificial Sequence: Synthetic polypeptide
PYMNGETSTKSLWVINSALRIKILCATYVIVNIRDIDKIY

SEQ ID NO: 1221 - protein, 40 aa, Artificial Sequence
  Description of Artificial Sequence: Synthetic polypeptide
YMNGETSTKSLWVINSALRIKILCATYVIVNIRDIDKIYV

SEQ ID NO: 1222 - protein, 40 aa, Artificial Sequence
  Description of Artificial Sequence: Synthetic polypeptide
MNGETSTKSLWVINSALRIKILCATYVIVNIRDIDKIYVR

SEQ ID NO: 1223 - protein, 40 aa, Artificial Sequence
  Description of Artificial Sequence: Synthetic polypeptide
NGETSTKSLWVINSALRIKILCATYVIVNIRDIDKIYVRT

SEQ ID NO: 1224 - protein, 40 aa, Artificial Sequence
  Description of Artificial Sequence: Synthetic polypeptide
ETSTKSLWVINSALRIKILCATYVIVNIRDIDKIYVRTGI

SEQ ID NO: 1225 - protein, 40 aa, Artificial Sequence
  Description of Artificial Sequence: Synthetic polypeptide
SLWVINSALRIKILCATYVIVNIRDIDKIYVRTGIYHGGE

SEQ ID NO: 1226 - protein, 40 aa, Artificial Sequence
  Description of Artificial Sequence: Synthetic polypeptide
VINSALRIKILCATYVIVNIRDIDKIYVRTGIYHGGEPLC

SEQ ID NO: 1227 - protein, 40 aa, Artificial Sequence
  Description of Artificial Sequence: Synthetic polypeptide
ALRIKILCATYVIVNIRDIDKIYVRTGIYHGGEPLCDNVN

SEQ ID NO: 1228 - protein, 40 aa, Artificial Sequence
  Description of Artificial Sequence: Synthetic polypeptide
ATPYMNGETSTKSLWVINSALRIKILCATYVYVNIRDIDK

SEQ ID NO: 1229 - protein, 40 aa, Artificial Sequence
  Description of Artificial Sequence: Synthetic polypeptide
TPYMNGETSTKSLWVINSALRIKILCATYVYVNIRDIDKI

SEQ ID NO: 1230 - protein, 40 aa, Artificial Sequence
  Description of Artificial Sequence: Synthetic polypeptide
PYMNGETSTKSLWVINSALRIKILCATYVYVNIRDIDKIY

SEQ ID NO: 1231 - protein, 40 aa, Artificial Sequence
  Description of Artificial Sequence: Synthetic polypeptide
YMNGETSTKSLWVINSALRIKILCATYVYVNIRDIDKIYV

SEQ ID NO: 1232 - protein, 40 aa, Artificial Sequence
  Description of Artificial Sequence: Synthetic polypeptide
MNGETSTKSLWVINSALRIKILCATYVYVNIRDIDKIYVR

SEQ ID NO: 1233 - protein, 40 aa, Artificial Sequence
  Description of Artificial Sequence: Synthetic polypeptide
NGETSTKSLWVINSALRIKILCATYVYVNIRDIDKIYVRT

SEQ ID NO: 1234 - protein, 40 aa, Artificial Sequence
  Description of Artificial Sequence: Synthetic polypeptide
ETSTKSLWVINSALRIKILCATYVYVNIRDIDKIYVRTGI

SEQ ID NO: 1235 - protein, 40 aa, Artificial Sequence
  Description of Artificial Sequence: Synthetic polypeptide
VINSALRIKILCATYVYVNIRDIDKIYVRTGIYHGGEPLC

SEQ ID NO: 1236 - protein, 40 aa, Artificial Sequence
  Description of Artificial Sequence: Synthetic polypeptide
RIKILCATYVYVNIRDIDKIYVRTGIYHGGEPLCDNVNTQ

SEQ ID NO: 1237 - protein, 40 aa, Artificial Sequence
  Description of Artificial Sequence: Synthetic polypeptide
IKILCATYVYVNIRDIDKIYVRTGIYHGGEPLCDNVNTQR

SEQ ID NO: 1238 - protein, 40 aa, Artificial Sequence
  Description of Artificial Sequence: Synthetic polypeptide
TYVNVNIRDIDKIYVRTGIYHGGVPLCDNVNTQRVPCSNP

SEQ ID NO: 1239 - protein, 40 aa, Artificial Sequence
  Description of Artificial Sequence: Synthetic polypeptide
NVNIRDIDKIYVRTGIYHGGVPLCDNVNTQRVPCSNPRWN

SEQ ID NO: 1240 - protein, 40 aa, Artificial Sequence
  Description of Artificial Sequence: Synthetic polypeptide
RTGIYHGGVPLCDNVNTQRVPCSNPRWNEWLNYDIYIPDL

SEQ ID NO: 1241 - protein, 40 aa, Artificial Sequence
  Description of Artificial Sequence: Synthetic polypeptide
GGVPLCDNVNTQRVPCSNPRWNEWLNYDIYIPDLPRAARL

SEQ ID NO: 1242 - protein, 40 aa, Artificial Sequence
  Description of Artificial Sequence: Synthetic polypeptide
LNYDIYIPDLPRAARLCLSICSVKGRKGAKEEHRPLAWGN

SEQ ID NO: 1243 - protein, 40 aa, Artificial Sequence
  Description of Artificial Sequence: Synthetic polypeptide
ARLCLSICSVKGRKGAKEEHRPLAWGNINLFDYTDTLVSG

SEQ ID NO: 1244 - protein, 40 aa, Artificial Sequence
  Description of Artificial Sequence: Synthetic polypeptide
TLVSGKMALNLWPVPHGLEDLLNPIGVTGSNPNKETLCLE

SEQ ID NO: 1245 - protein, 40 aa, Artificial Sequence
  Description of Artificial Sequence: Synthetic polypeptide
SGKMALNLWPVPHGLEDLLNPIGVTGSNPNKETLCLELEF

SEQ ID NO: 1246 - protein, 40 aa, Artificial Sequence
  Description of Artificial Sequence: Synthetic polypeptide
GKMALNLWPVPHGLEDLLNPIGVTGSNPNKETLCLELEFD

SEQ ID NO: 1247 - protein, 40 aa, Artificial Sequence
  Description of Artificial Sequence: Synthetic polypeptide
KMALNLWPVPHGLEDLLNPIGVTGSNPNKETLCLELEFDW

SEQ ID NO: 1248 - protein, 40 aa, Artificial Sequence
  Description of Artificial Sequence: Synthetic polypeptide
ALNLWPVPHGLEDLLNPIGVTGSNPNKETLCLELEFDWFS

SEQ ID NO: 1249 - protein, 40 aa, Artificial Sequence
  Description of Artificial Sequence: Synthetic polypeptide
WPVPHGLEDLLNPIGVTGSNPNKETLCLELEFDWFSSVVK

SEQ ID NO: 1250 - protein, 40 aa, Artificial Sequence
  Description of Artificial Sequence: Synthetic polypeptide
PVPHGLEDLLNPIGVTGSNPNKETLCLELEFDWFSSVVKF

SEQ ID NO: 1251 - protein, 40 aa, Artificial Sequence
  Description of Artificial Sequence: Synthetic polypeptide
LLNPIGVTGSNPNKETLCLELEFDWFSSVVKFPDMSVIEE

SEQ ID NO: 1252 - protein, 40 aa, Artificial Sequence
  Description of Artificial Sequence: Synthetic polypeptide
SNPNKETLCLELEFDWFSSVVKFPDMSVIEEHANWSVSRE

SEQ ID NO: 1253 - protein, 40 aa, Artificial Sequence
  Description of Artificial Sequence: Synthetic polypeptide
NPNKETLCLELEFDWFSSVVKFPDMSVIEEHANWSVSREA

SEQ ID NO: 1254 - protein, 40 aa, Artificial Sequence
  Description of Artificial Sequence: Synthetic polypeptide
TLCLELEFDWFSSVVKFPDMSVIEEHANWSVSREAGFSYS

SEQ ID NO: 1255 - protein, 40 aa, Artificial Sequence
  Description of Artificial Sequence: Synthetic polypeptide
ELRENDKEQLKAISTRDRLSEITEQEKDFLWSHRHYCVTI

SEQ ID NO: 1256 - protein, 40 aa, Artificial Sequence
  Description of Artificial Sequence: Synthetic polypeptide
RDRLSEITEQEKDFLWSHRHYCVTIPEILPKLLLSVKWNS

SEQ ID NO: 1257 - protein, 40 aa, Artificial Sequence
  Description of Artificial Sequence: Synthetic polypeptide
DKEQLKAISTRDPLSEITAQEKDFLWSHRHYCVTIPEILP

SEQ ID NO: 1258 - protein, 40 aa, Artificial Sequence
  Description of Artificial Sequence: Synthetic polypeptide
AQEKDFLWSHRHYCVTIPEILPKLLLSVKWNSRDEVAQMY

SEQ ID NO: 1259 - protein, 40 aa, Artificial Sequence
  Description of Artificial Sequence: Synthetic polypeptide
EQLKAISTRDPLSEITKQEKDFLWSHRHYCVTIPEILPKL

SEQ ID NO: 1260 - protein, 40 aa, Artificial Sequence
  Description of Artificial Sequence: Synthetic polypeptide
SEITKQEKDFLWSHRHYCVTIPEILPKLLLSVKWNSRDEV

SEQ ID NO: 1261 - protein, 40 aa, Artificial Sequence
  Description of Artificial Sequence: Synthetic polypeptide
KAISTRDPLSEITEREKDFLWSHRHYCVTIPEILPKLLLS

SEQ ID NO: 1262 - protein, 40 aa, Artificial Sequence
  Description of Artificial Sequence: Synthetic polypeptide
RDPLSEITEREKDFLWSHRHYCVTIPEILPKLLLSVKWNS

SEQ ID NO: 1263 - protein, 40 aa, Artificial Sequence
  Description of Artificial Sequence: Synthetic polypeptide
NIMVKDDGQLFHIDFGHFLDHKKKKFGYKRERVPFVFTQD

SEQ ID NO: 1264 - protein, 40 aa, Artificial Sequence
  Description of Artificial Sequence: Synthetic polypeptide
MVKDDGQLFHIDFGHFLDHKKKKFGYKRERVPFVFTQDFL

SEQ ID NO: 1265 - protein, 40 aa, Artificial Sequence
  Description of Artificial Sequence: Synthetic polypeptide
VKDDGQLFHIDFGHFLDHKKKKFGYKRERVPFVFTQDFLI

SEQ ID NO: 1266 - protein, 40 aa, Artificial Sequence
  Description of Artificial Sequence: Synthetic polypeptide
KDDGQLFHIDFGHFLDHKKKKFGYKRERVPFVFTQDFLIV

SEQ ID NO: 1267 - protein, 40 aa, Artificial Sequence
  Description of Artificial Sequence: Synthetic polypeptide
DDGQLFHIDFGHFLDHKKKKFGYKRERVPFVFTQDFLIVI

SEQ ID NO: 1268 - protein, 40 aa, Artificial Sequence
  Description of Artificial Sequence: Synthetic polypeptide
DGQLFHIDFGHFLDHKKKKFGYKRERVPFVFTQDFLIVIS

SEQ ID NO: 1269 - protein, 40 aa, Artificial Sequence
  Description of Artificial Sequence: Synthetic polypeptide
GYKRERVPFVFTQDFLIVISKGAQECTKTREFERFQEMCY

SEQ ID NO: 1270 - protein, 40 aa, Artificial Sequence
  Description of Artificial Sequence: Synthetic polypeptide
YKRERVPFVFTQDFLIVISKGAQECTKTREFERFQEMCYK

SEQ ID NO: 1271 - protein, 40 aa, Artificial Sequence
  Description of Artificial Sequence: Synthetic polypeptide
KRERVPFVFTQDFLIVISKGAQECTKTREFERFQEMCYKA

SEQ ID NO: 1272 - protein, 40 aa, Artificial Sequence
  Description of Artificial Sequence: Synthetic polypeptide
RERVPFVFTQDFLIVISKGAQECTKTREFERFQEMCYKAY

SEQ ID NO: 1273 - protein, 40 aa, Artificial Sequence
  Description of Artificial Sequence: Synthetic polypeptide
VPFVFTQDFLIVISKGAQECTKTREFERFQEMCYKAYLAI

SEQ ID NO: 1274 - protein, 40 aa, Artificial Sequence
  Description of Artificial Sequence: Synthetic polypeptide
EEVNEKLRDTADGTFLVRDASTKMHGDYTLTLRKWGNNKL

SEQ ID NO: 1275 - protein, 40 aa, Artificial Sequence
  Description of Artificial Sequence: Synthetic polypeptide
DTADGTFLVRDASTKMHGDYTLTLRKWGNNKLIKIFHRDG

SEQ ID NO: 1276 - protein, 40 aa, Artificial Sequence
  Description of Artificial Sequence: Synthetic polypeptide
HGDYTLTLRKWGNNKLIKIFHRDGKYGFSDPLTFSSVVEL

SEQ ID NO: 1277 - protein, 40 aa, Artificial Sequence
  Description of Artificial Sequence: Synthetic polypeptide
GDYTLTLRKWGNNKLIKIFHRDGKYGFSDPLTFSSVVELI

SEQ ID NO: 1278 - protein, 40 aa, Artificial Sequence
  Description of Artificial Sequence: Synthetic polypeptide
DYTLTLRKWGNNKLIKIFHRDGKYGFSDPLTFSSVVELIN

SEQ ID NO: 1279 - protein, 40 aa, Artificial Sequence
  Description of Artificial Sequence: Synthetic polypeptide
KWGNNKLIKIFHRDGKYGFSDPLTFSSVVELINHYRNESL

SEQ ID NO: 1280 - protein, 40 aa, Artificial Sequence
  Description of Artificial Sequence: Synthetic polypeptide
REEVNEKLRDTADGTFLVRDASTKMHGDYTLTLRKGRNNK

SEQ ID NO: 1281 - protein, 40 aa, Artificial Sequence
  Description of Artificial Sequence: Synthetic polypeptide
REEVNEKLRDTADGTFLVRDASTKMHGDYTLTLRKGGNNE

SEQ ID NO: 1282 - protein, 40 aa, Artificial Sequence
  Description of Artificial Sequence: Synthetic polypeptide
EEVNEKLRDTADGTFLVRDASTKMHGDYTLTLRKGGNNEL

SEQ ID NO: 1283 - protein, 40 aa, Artificial Sequence
  Description of Artificial Sequence: Synthetic polypeptide
LVRDASTKMHGDYTLTLRKGGNNELIKIFHRDGKYGFSDP

SEQ ID NO: 1284 - protein, 40 aa, Artificial Sequence
  Description of Artificial Sequence: Synthetic polypeptide
RDASTKMHGDYTLTLRKGGNNELIKIFHRDGKYGFSDPLT

SEQ ID NO: 1285 - protein, 40 aa, Artificial Sequence
  Description of Artificial Sequence: Synthetic polypeptide
ASTKMHGDYTLTLRKGGNNELIKIFHRDGKYGFSDPLTFS

SEQ ID NO: 1286 - protein, 40 aa, Artificial Sequence
  Description of Artificial Sequence: Synthetic polypeptide
KMHGDYTLTLRKGGNNELIKIFHRDGKYGFSDPLTFSSVV

SEQ ID NO: 1287 - protein, 40 aa, Artificial Sequence
  Description of Artificial Sequence: Synthetic polypeptide
DYTLTLRKGGNNELIKIFHRDGKYGFSDPLTFSSVVELIN

SEQ ID NO: 1288 - protein, 40 aa, Artificial Sequence
  Description of Artificial Sequence: Synthetic polypeptide
EVNEKLRDTADGTFLVRDASTKMHGDYTLTLRKGGNNNLI

SEQ ID NO: 1289 - protein, 40 aa, Artificial Sequence
  Description of Artificial Sequence: Synthetic polypeptide
HGDYTLTLRKGGNNNLIKIFHRDGKYGFSDPLTFSSVVEL

SEQ ID NO: 1290 - protein, 40 aa, Artificial Sequence
  Description of Artificial Sequence: Synthetic polypeptide
GDYTLTLRKGGNNNLIKIFHRDGKYGFSDPLTFSSVVELI

SEQ ID NO: 1291 - protein, 40 aa, Artificial Sequence
  Description of Artificial Sequence: Synthetic polypeptide
TLTLRKGGNNNLIKIFHRDGKYGFSDPLTFSSVVELINHY

SEQ ID NO: 1292 - protein, 40 aa, Artificial Sequence
  Description of Artificial Sequence: Synthetic polypeptide
NNNLIKIFHRDGKYGFSDPLTFSSVVELINHYRNESLAQY

SEQ ID NO: 1293 - protein, 40 aa, Artificial Sequence
  Description of Artificial Sequence: Synthetic polypeptide
EKEIQRIMHNYDKLKSRISEIIDSRRRLEEDLKKQAAEYP

SEQ ID NO: 1294 - protein, 40 aa, Artificial Sequence
  Description of Artificial Sequence: Synthetic polypeptide
KEIQRIMHNYDKLKSRISEIIDSRRRLEEDLKKQAAEYPE

SEQ ID NO: 1295 - protein, 40 aa, Artificial Sequence
  Description of Artificial Sequence: Synthetic polypeptide
EIQRIMHNYDKLKSRISEIIDSRRRLEEDLKKQAAEYPEI

SEQ ID NO: 1296 - protein, 40 aa, Artificial Sequence
  Description of Artificial Sequence: Synthetic polypeptide
IQRIMHNYDKLKSRISEIIDSRRRLEEDLKKQAAEYPEID

SEQ ID NO: 1297 - protein, 40 aa, Artificial Sequence
  Description of Artificial Sequence: Synthetic polypeptide
IMHNYDKLKSRISEIIDSRRRLEEDLKKQAAEYPEIDKRM

SEQ ID NO: 1298 - protein, 40 aa, Artificial Sequence
  Description of Artificial Sequence: Synthetic polypeptide
HNYDKLKSRISEIIDSRRRLEEDLKKQAAEYPEIDKRMNS

SEQ ID NO: 1299 - protein, 40 aa, Artificial Sequence
  Description of Artificial Sequence: Synthetic polypeptide
SEIIDSRRRLEEDLKKQAAEYPEIDKRMNSIKPDLIQLRK

SEQ ID NO: 1300 - protein, 40 aa, Artificial Sequence
  Description of Artificial Sequence: Synthetic polypeptide
EIIDSRRRLEEDLKKQAAEYPEIDKRMNSIKPDLIQLRKT

SEQ ID NO: 1301 - protein, 40 aa, Artificial Sequence
  Description of Artificial Sequence: Synthetic polypeptide
IDSRRRLEEDLKKQAAEYPEIDKRMNSIKPDLIQLRKTRD

SEQ ID NO: 1302 - protein, 40 aa, Artificial Sequence
  Description of Artificial Sequence: Synthetic polypeptide
SRISEIIDSRRRLEEDLKKQAAEYREIGKRMNSIKPDLIQ

SEQ ID NO: 1303 - protein, 40 aa, Artificial Sequence
  Description of Artificial Sequence: Synthetic polypeptide
IQRIMHNYDKLKSRISEIIDSRRRLEEDLKKQAAEYREIY

SEQ ID NO: 1304 - protein, 40 aa, Artificial Sequence
  Description of Artificial Sequence: Synthetic polypeptide
DKLKSRISEIIDSRRRLEEDLKKQAAEYREIDKRMNSIEP

SEQ ID NO: 1305 - protein, 40 aa, Artificial Sequence
  Description of Artificial Sequence: Synthetic polypeptide
KLKSRISEIIDSRRRLEEDLKKQAAEYREIDKRMNSIEPD

SEQ ID NO: 1306 - protein, 40 aa, Artificial Sequence
  Description of Artificial Sequence: Synthetic polypeptide
KSRISEIIDSRRRLEEDLKKQAAEYREIDKRMNSIEPDLI

SEQ ID NO: 1307 - protein, 40 aa, Artificial Sequence
  Description of Artificial Sequence: Synthetic polypeptide
SEIIDSRRRLEEDLKKQAAEYREIDKRMNSIKTDLIQLRK

SEQ ID NO: 1308 - protein, 40 aa, Artificial Sequence
  Description of Artificial Sequence: Synthetic polypeptide
RLEEDLKKQAAEYREIDKRMNSIKTDLIQLRKTRDQYLMW

SEQ ID NO: 1309 - protein, 40 aa, Artificial Sequence
  Description of Artificial Sequence: Synthetic polypeptide
YFRNLCSDDTRMVRRAAASKLGEFAKVLELDNVKSEIIPM

SEQ ID NO: 1310 - protein, 40 aa, Artificial Sequence
  Description of Artificial Sequence: Synthetic polypeptide
CSDDTRMVRRAAASKLGEFAKVLELDNVKSEIIPMFSNLA

SEQ ID NO: 1311 - protein, 40 aa, Artificial Sequence
  Description of Artificial Sequence: Synthetic polypeptide
RMVRRAAASKLGEFAKVLELDNVKSEIIPMFSNLASDEQD

SEQ ID NO: 1312 - protein, 40 aa, Artificial Sequence
  Description of Artificial Sequence: Synthetic polypeptide
TPMVWRAAASKLGEFAKVLELDNVKSEIIPMFSNLASDEQ

SEQ ID NO: 1313 - protein, 40 aa, Artificial Sequence
  Description of Artificial Sequence: Synthetic polypeptide
QYFRNLCSDDTPMVRWAAASKLGEFAKVLELDNVKSEIIP

SEQ ID NO: 1314 - protein, 40 aa, Artificial Sequence
  Description of Artificial Sequence: Synthetic polypeptide
RNLCSDDTPMVRWAAASKLGEFAKVLELDNVKSEIIPMFS

SEQ ID NO: 1315 - protein, 40 aa, Artificial Sequence
  Description of Artificial Sequence: Synthetic polypeptide
WAAASKLGEFAKVLELDNVKSEIIPMFSNLASDEQDSVRL

SEQ ID NO: 1316 - protein, 40 aa, Artificial Sequence
  Description of Artificial Sequence: Synthetic polypeptide
MFSNLASDEKDSVRLLAVEACVNIAQLLPQEDLEALVMPT

SEQ ID NO: 1317 - protein, 40 aa, Artificial Sequence
  Description of Artificial Sequence: Synthetic polypeptide
VRRAAASKLGEFAKVLELDNVKSEIIPMFSNLASDERDSV

SEQ ID NO: 1318 - protein, 40 aa, Artificial Sequence
  Description of Artificial Sequence: Synthetic polypeptide
RRAAASKLGEFAKVLELDNVKSEIIPMFSNLASDEQDSMR

SEQ ID NO: 1319 - protein, 40 aa, Artificial Sequence
  Description of Artificial Sequence: Synthetic polypeptide
NVKSEIIPMFSNLASDEQDSMRLLAVEACVNIAQLLPQED

SEQ ID NO: 1320 - protein, 40 aa, Artificial Sequence
  Description of Artificial Sequence: Synthetic polypeptide
PQEDLEALVMPTLRQAAEDKYWRVRYMVADKFTELQKAVG

SEQ ID NO: 1321 - protein, 40 aa, Artificial Sequence
  Description of Artificial Sequence: Synthetic polypeptide
VMPTLRQAAEDKYWRVRYMVADKFTELQKAVGPEITKTDL

SEQ ID NO: 1322 - protein, 40 aa, Artificial Sequence
  Description of Artificial Sequence: Synthetic polypeptide
QLLPQEDLEALVMPTLRQAAEDKSCRVRYMVADKFTELQK

SEQ ID NO: 1323 - protein, 40 aa, Artificial Sequence
  Description of Artificial Sequence: Synthetic polypeptide
EDLEALVMPTLRQAAEDKSCRVRYMVADKFTELQKAVGPE

SEQ ID NO: 1324 - protein, 40 aa, Artificial Sequence
  Description of Artificial Sequence: Synthetic polypeptide
AVEACVNIAQLLPQEDLEALVMPTLRQAAEDKSWCVRYMV

SEQ ID NO: 1325 - protein, 40 aa, Artificial Sequence
  Description of Artificial Sequence: Synthetic polypeptide
QLLPQEDLEALVMPTLRQAAEDKSWCVRYMVADKFTELQK

SEQ ID NO: 1326 - protein, 40 aa, Artificial Sequence
  Description of Artificial Sequence: Synthetic polypeptide
AVEACVNIAQLLPQEDLEALVMPTLRQAAEDKSWHVRYMV

SEQ ID NO: 1327 - protein, 40 aa, Artificial Sequence
  Description of Artificial Sequence: Synthetic polypeptide
LVMPTLRQAAEDKSWHVRYMVADKFTELQKAVGPEITKTD

SEQ ID NO: 1328 - protein, 40 aa, Artificial Sequence
  Description of Artificial Sequence: Synthetic polypeptide
VMPTLRQAAEDKSWHVRYMVADKFTELQKAVGPEITKTDL

SEQ ID NO: 1329 - protein, 40 aa, Artificial Sequence
  Description of Artificial Sequence: Synthetic polypeptide
SWRVGYMVADKFTELQKAVGPEITKTDLVPAFQNLMKDCE

SEQ ID NO: 1330 - protein, 40 aa, Artificial Sequence
  Description of Artificial Sequence: Synthetic polypeptide
TDKVKQGFWEEFETLQQQECKLLYSRKEGQRQENKNKNRC

SEQ ID NO: 1331 - protein, 40 aa, Artificial Sequence
  Description of Artificial Sequence: Synthetic polypeptide
VKQGFWEEFETLQQQECKLLYSRKEGQRQENKNKNRCKNI

SEQ ID NO: 1332 - protein, 40 aa, Artificial Sequence
  Description of Artificial Sequence: Synthetic polypeptide
GFWEEFETLQQQECKLLYSRKEGQRQENKNKNRCKNILPF

SEQ ID NO: 1333 - protein, 40 aa, Artificial Sequence
  Description of Artificial Sequence: Synthetic polypeptide
FWEEFETLQQQECKLLYSRKEGQRQENKNKNRCKNILPFD

SEQ ID NO: 1334 - protein, 40 aa, Artificial Sequence
  Description of Artificial Sequence: Synthetic polypeptide
WEEFETLQQQECKLLYSRKEGQRQENKNKNRCKNILPFDH

SEQ ID NO: 1335 - protein, 40 aa, Artificial Sequence
  Description of Artificial Sequence: Synthetic polypeptide
EFETLQQQECKLLYSRKEGQRQENKNKNRCKNILPFDHTR

SEQ ID NO: 1336 - protein, 40 aa, Artificial Sequence
  Description of Artificial Sequence: Synthetic polypeptide
QENKNKNRCKNILPFDHTRVVLHDGDPNEPVSDYINANII

SEQ ID NO: 1337 - protein, 40 aa, Artificial Sequence
  Description of Artificial Sequence: Synthetic polypeptide
QGFWEEFETLQQQECKLLYSRKEGQRQENKNKNRYKNMLP

SEQ ID NO: 1338 - protein, 40 aa, Artificial Sequence
  Description of Artificial Sequence: Synthetic polypeptide
GFWEEFETLQQQECKLLYSRKEGQRQENKNKNRYKNMLPF

SEQ ID NO: 1339 - protein, 40 aa, Artificial Sequence
  Description of Artificial Sequence: Synthetic polypeptide
FWEEFETLQQQECKLLYSRKEGQRQENKNKNRYKNMLPFD

SEQ ID NO: 1340 - protein, 40 aa, Artificial Sequence
  Description of Artificial Sequence: Synthetic polypeptide
LLYSRKEGQRQENKNKNRYKNMLPFDHTRVVLHDGDPNEP

SEQ ID NO: 1341 - protein, 40 aa, Artificial Sequence
  Description of Artificial Sequence: Synthetic polypeptide
LYSRKEGQRQENKNKNRYKNMLPFDHTRVVLHDGDPNEPV

SEQ ID NO: 1342 - protein, 40 aa, Artificial Sequence
  Description of Artificial Sequence: Synthetic polypeptide
YSRKEGQRQENKNKNRYKNMLPFDHTRVVLHDGDPNEPVS

SEQ ID NO: 1343 - protein, 40 aa, Artificial Sequence
  Description of Artificial Sequence: Synthetic polypeptide
SRKEGQRQENKNKNRYKNMLPFDHTRVVLHDGDPNEPVSD

SEQ ID NO: 1344 - protein, 40 aa, Artificial Sequence
  Description of Artificial Sequence: Synthetic polypeptide
RKEGQRQENKNKNRYKNMLPFDHTRVVLHDGDPNEPVSDY

SEQ ID NO: 1345 - protein, 40 aa, Artificial Sequence
  Description of Artificial Sequence: Synthetic polypeptide
KEGQRQENKNKNRYKNMLPFDHTRVVLHDGDPNEPVSDYI

SEQ ID NO: 1346 - protein, 40 aa, Artificial Sequence
  Description of Artificial Sequence: Synthetic polypeptide
EGQRQENKNKNRYKNMLPFDHTRVVLHDGDPNEPVSDYIN

SEQ ID NO: 1347 - protein, 40 aa, Artificial Sequence
  Description of Artificial Sequence: Synthetic polypeptide
GQRQENKNKNRYKNMLPFDHTRVVLHDGDPNEPVSDYINA

SEQ ID NO: 1348 - protein, 40 aa, Artificial Sequence
  Description of Artificial Sequence: Synthetic polypeptide
ENKNKNRYKNMLPFDHTRVVLHDGDPNEPVSDYINANIIM

SEQ ID NO: 1349 - protein, 40 aa, Artificial Sequence
  Description of Artificial Sequence: Synthetic polypeptide
NKNKNRYKNMLPFDHTRVVLHDGDPNEPVSDYINANIIMP

SEQ ID NO: 1350 - protein, 40 aa, Artificial Sequence
  Description of Artificial Sequence: Synthetic polypeptide
DHGVPSDPGGVLDFLEEVHHKQESIMDAGPVVVHCSGGIG

SEQ ID NO: 1351 - protein, 40 aa, Artificial Sequence
  Description of Artificial Sequence: Synthetic polypeptide
VLDFLEEVHHKQESIMDAGPVVVHCSGGIGRTGTFIVIDI

SEQ ID NO: 1352 - protein, 40 aa, Artificial Sequence
  Description of Artificial Sequence: Synthetic polypeptide
VVVHCSTGIGRTGTFIVIDILIDIIREKGVDCDIDVPKTI

SEQ ID NO: 1353 - protein, 40 aa, Artificial Sequence
  Description of Artificial Sequence: Synthetic polypeptide
CSAGIGRTGTFIVIDILIDIIREKGVDCDIDVPKTIQMVW

SEQ ID NO: 1354 - protein, 40 aa, Artificial Sequence
  Description of Artificial Sequence: Synthetic polypeptide
SAGIGRTGTFIVIDILIDIIREKGVDCDIDVPKTIQMVWS

SEQ ID NO: 1355 - protein, 40 aa, Artificial Sequence
  Description of Artificial Sequence: Synthetic polypeptide
IGRTGTFIVIDILIDIIREKGVDCDIDVPKTIQMVWSQRS

SEQ ID NO: 1356 - protein, 40 aa, Artificial Sequence
  Description of Artificial Sequence: Synthetic polypeptide
DVPKTIQMVWSQRSGMVQTEAQYRFIYMAVQHYIETLQRR

SEQ ID NO: 1357 - protein, 40 aa, Artificial Sequence
  Description of Artificial Sequence: Synthetic polypeptide
KTIQMVWSQRSGMVQTEAQYRFIYMAVQHYIETLQRRIEE

SEQ ID NO: 1358 - protein, 40 aa, Artificial Sequence
  Description of Artificial Sequence: Synthetic polypeptide
TIQMVWSQRSGMVQTEAQYRFIYMAVQHYIETLQRRIEEE

SEQ ID NO: 1359 - protein, 40 aa, Artificial Sequence
  Description of Artificial Sequence: Synthetic polypeptide
WSQRSGMVQTEAQYRFIYMAVQHYIETLQRRIEEEQKSKR

SEQ ID NO: 1360 - protein, 40 aa, Artificial Sequence
  Description of Artificial Sequence: Synthetic polypeptide
IDILIDIIREKGVDCDIDVPKTIQMVRSQRSVMVQTEAQY

SEQ ID NO: 1361 - protein, 40 aa, Artificial Sequence
  Description of Artificial Sequence: Synthetic polypeptide
DILIDIIREKGVDCDIDVPKTIQMVRSQRSVMVQTEAQYR

SEQ ID NO: 1362 - protein, 40 aa, Artificial Sequence
  Description of Artificial Sequence: Synthetic polypeptide
DIIREKGVDCDIDVPKTIQMVRSQRSVMVQTEAQYRFIYM

SEQ ID NO: 1363 - protein, 40 aa, Artificial Sequence
  Description of Artificial Sequence: Synthetic polypeptide
REKGVDCDIDVPKTIQMVRSQRSVMVQTEAQYRFIYMAVQ

SEQ ID NO: 1364 - protein, 40 aa, Artificial Sequence
  Description of Artificial Sequence: Synthetic polypeptide
VDCDIDVPKTIQMVRSQRSVMVQTEAQYRFIYMAVQHYIE

SEQ ID NO: 1365 - protein, 40 aa, Artificial Sequence
  Description of Artificial Sequence: Synthetic polypeptide
QMVRSQRSVMVQTEAQYRFIYMAVQHYIETLQRRIEEEQK

SEQ ID NO: 1366 - protein, 40 aa, Artificial Sequence
  Description of Artificial Sequence: Synthetic polypeptide
SVMVQTEAQYRFIYMAVQHYIETLQRRIEEEQKSKRKGHE

SEQ ID NO: 1367 - protein, 40 aa, Artificial Sequence
  Description of Artificial Sequence: Synthetic polypeptide
IDILIDIIREKGVDCDIDVPKTIQMVRSQRSGIVQTEAQY

SEQ ID NO: 1368 - protein, 40 aa, Artificial Sequence
  Description of Artificial Sequence: Synthetic polypeptide
DIIREKGVDCDIDVPKTIQMVRSQRSGIVQTEAQYRFIYM

SEQ ID NO: 1369 - protein, 40 aa, Artificial Sequence
  Description of Artificial Sequence: Synthetic polypeptide
DIDVPKTIQMVRSQRSGIVQTEAQYRFIYMAVQHYIETLQ

SEQ ID NO: 1370 - protein, 40 aa, Artificial Sequence
  Description of Artificial Sequence: Synthetic polypeptide
DIIREKGVDCDIDVPKTIQMVRSQRSGMVQKEAQYRFIYM

SEQ ID NO: 1371 - protein, 40 aa, Artificial Sequence
  Description of Artificial Sequence: Synthetic polypeptide
KGVDCDIDVPKTIQMVRSQRSGMVQKEAQYRFIYMAVQHY

SEQ ID NO: 1372 - protein, 40 aa, Artificial Sequence
  Description of Artificial Sequence: Synthetic polypeptide
MVQKEAQYRFIYMAVQHYIETLQRRIEEEQKSKRKGHEYT

SEQ ID NO: 1373 - protein, 40 aa, Artificial Sequence
  Description of Artificial Sequence: Synthetic polypeptide
ILIDIIREKGVDCDIDVPKTIQMVRSQRSGMVQTEALYRF

SEQ ID NO: 1374 - protein, 40 aa, Artificial Sequence
  Description of Artificial Sequence: Synthetic polypeptide
VDCDIDVPKTIQMVRSQRSGMVQTEALYRFIYMAVQHYIE

SEQ ID NO: 1375 - protein, 40 aa, Artificial Sequence
  Description of Artificial Sequence: Synthetic polypeptide
VRSQRSGMVQTEALYRFIYMAVQHYIETLQRRIEEEQKSK

SEQ ID NO: 1376 - protein, 40 aa, Artificial Sequence
  Description of Artificial Sequence: Synthetic polypeptide
KSNPGDFTLSVRRNGAVTHIKIQNTVDYYDLYGGEKFATL

SEQ ID NO: 1377 - protein, 40 aa, Artificial Sequence
  Description of Artificial Sequence: Synthetic polypeptide
FTLSVRRNGAVTHIKIQNTVDYYDLYGGEKFATLAELVQY

SEQ ID NO: 1378 - protein, 40 aa, Artificial Sequence
  Description of Artificial Sequence: Synthetic polypeptide
LSVRRNGAVTHIKIQNTGDYYDLYGGEKLATLAELVQYYM

SEQ ID NO: 1379 - protein, 40 aa, Artificial Sequence
  Description of Artificial Sequence: Synthetic polypeptide
THIKIQNTGDYYDLYGGEKLATLAELVQYYMEHHGQLKEK

SEQ ID NO: 1380 - protein, 40 aa, Artificial Sequence
  Description of Artificial Sequence: Synthetic polypeptide
IQNTGDYYDLYGGEKFDTLAELVQYYMEHHGQLKEKNGDV

SEQ ID NO: 1381 - protein, 40 aa, Artificial Sequence
  Description of Artificial Sequence: Synthetic polypeptide
TGDYYDLYGGEKFDTLAELVQYYMEHHGQLKEKNGDVIEL

SEQ ID NO: 1382 - protein, 40 aa, Artificial Sequence
  Description of Artificial Sequence: Synthetic polypeptide
ATLAALVQYYMEHHGQLKEKNGDVIELKYPLNCADPTSER

SEQ ID NO: 1383 - protein, 40 aa, Artificial Sequence
  Description of Artificial Sequence: Synthetic polypeptide
SVRRNGAVTHIKIQNTGDYYDLYGGEKFATLAKLVQYYME

SEQ ID NO: 1384 - protein, 40 aa, Artificial Sequence
  Description of Artificial Sequence: Synthetic polypeptide
GAVTHIKIQNTGDYYDLYGGEKFATLAKLVQYYMEHHGQL

SEQ ID NO: 1385 - protein, 40 aa, Artificial Sequence
  Description of Artificial Sequence: Synthetic polypeptide
NTGDYYDLYGGEKFATLAKLVQYYMEHHGQLKEKNGDVIE

SEQ ID NO: 1386 - protein, 40 aa, Artificial Sequence
  Description of Artificial Sequence: Synthetic polypeptide
KWYPEVRHHCPNTPIILVGTNLDLRDDKDTIEKLKEKKLT

SEQ ID NO: 1387 - protein, 40 aa, Artificial Sequence
  Description of Artificial Sequence: Synthetic polypeptide
PEVRHHCPNTPIILVGTNLDLRDDKDTIEKLKEKKLTPIT

SEQ ID NO: 1388 - protein, 40 aa, Artificial Sequence
  Description of Artificial Sequence: Synthetic polypeptide
AIKCVVVGDGAVSKTCLLISYTTNAFPGEYIPTVFDNYSA

SEQ ID NO: 1389 - protein, 40 aa, Artificial Sequence
  Description of Artificial Sequence: Synthetic polypeptide
KLTPITYPQGLAMAKEIGAVKYLECSVLTQRGLKTVFDEA

SEQ ID NO: 1390 - protein, 40 aa, Artificial Sequence
  Description of Artificial Sequence: Synthetic polypeptide
CVVVGDGAVGKTCLLISYTTNAFLGEYIPTVFDNYSANVM

SEQ ID NO: 1391 - protein, 40 aa, Artificial Sequence
  Description of Artificial Sequence: Synthetic polypeptide
VVGDGAVGKTCLLISYTTNAFLGEYIPTVFDNYSANVMVD

SEQ ID NO: 1392 - protein, 40 aa, Artificial Sequence
  Description of Artificial Sequence: Synthetic polypeptide
VVVGDGAVGKTCLLISYTTNAFSGEYIPTVFDNYSANVMV

SEQ ID NO: 1393 - protein, 40 aa, Artificial Sequence
  Description of Artificial Sequence: Synthetic polypeptide
AFPGEYIPTVFDNYSANVMVDGKPVNLGLWDTAGREDYDR

SEQ ID NO: 1394 - protein, 40 aa, Artificial Sequence
  Description of Artificial Sequence: Synthetic polypeptide
SANVMVDGKPVNLGLWDTAGREDYDRLRPLSYPQTVGETY

SEQ ID NO: 1395 - protein, 40 aa, Artificial Sequence
  Description of Artificial Sequence: Synthetic polypeptide
VMVDGKPVNLGLWDTAGREDYDRLRPLSYPQTVGETYGKD

SEQ ID NO: 1396 - protein, 40 aa, Artificial Sequence
  Description of Artificial Sequence: Synthetic polypeptide
MVDGKPVNLGLWDTAGREDYDRLRPLSYPQTVGETYGKDI

SEQ ID NO: 1397 - protein, 40 aa, Artificial Sequence
  Description of Artificial Sequence: Synthetic polypeptide
DGKPVNLGLWDTAGREDYDRLRPLSYPQTVGETYGKDITS

SEQ ID NO: 1398 - protein, 40 aa, Artificial Sequence
  Description of Artificial Sequence: Synthetic polypeptide
PVNLGLWDTAGREDYDRLRPLSYPQTVGETYGKDITSRGK

SEQ ID NO: 1399 - protein, 40 aa, Artificial Sequence
  Description of Artificial Sequence: Synthetic polypeptide
DTAGREDYDRLRPLSYPQTVGETYGKDITSRGKDKPIADV

SEQ ID NO: 1400 - protein, 40 aa, Artificial Sequence
  Description of Artificial Sequence: Synthetic polypeptide
REDYDRLRPLSYPQTVGETYGKDITSRGKDKPIADVFLIC

SEQ ID NO: 1401 - protein, 40 aa, Artificial Sequence
  Description of Artificial Sequence: Synthetic polypeptide
VFDNYSANVMVDGKPVNLGLWDTAGQEDYDRLHPLSYPQT

SEQ ID NO: 1402 - protein, 40 aa, Artificial Sequence
  Description of Artificial Sequence: Synthetic polypeptide
VMVDGKPVNLGLWDTAGQEDYDRLHPLSYPQTVGETYGKD

SEQ ID NO: 1403 - protein, 40 aa, Artificial Sequence
  Description of Artificial Sequence: Synthetic polypeptide
MVDGKPVNLGLWDTAGQEDYDRLHPLSYPQTVGETYGKDI

SEQ ID NO: 1404 - protein, 40 aa, Artificial Sequence
  Description of Artificial Sequence: Synthetic polypeptide
VDGKPVNLGLWDTAGQEDYDRLHPLSYPQTVGETYGKDIT

SEQ ID NO: 1405 - protein, 40 aa, Artificial Sequence
  Description of Artificial Sequence: Synthetic polypeptide
VNLGLWDTAGQEDYDRLHPLSYPQTVGETYGKDITSRGKD

SEQ ID NO: 1406 - protein, 40 aa, Artificial Sequence
  Description of Artificial Sequence: Synthetic polypeptide
LGLWDTAGQEDYDRLHPLSYPQTVGETYGKDITSRGKDKP

SEQ ID NO: 1407 - protein, 40 aa, Artificial Sequence
  Description of Artificial Sequence: Synthetic polypeptide
LWDTAGQEDYDRLHPLSYPQTVGETYGKDITSRGKDKPIA

SEQ ID NO: 1408 - protein, 40 aa, Artificial Sequence
  Description of Artificial Sequence: Synthetic polypeptide
WDTAGQEDYDRLHPLSYPQTVGETYGKDITSRGKDKPIAD

SEQ ID NO: 1409 - protein, 40 aa, Artificial Sequence
  Description of Artificial Sequence: Synthetic polypeptide
TAGQEDYDRLHPLSYPQTVGETYGKDITSRGKDKPIADVF

SEQ ID NO: 1410 - protein, 40 aa, Artificial Sequence
  Description of Artificial Sequence: Synthetic polypeptide
QEDYDRLHPLSYPQTVGETYGKDITSRGKDKPIADVFLIC

SEQ ID NO: 1411 - protein, 40 aa, Artificial Sequence
  Description of Artificial Sequence: Synthetic polypeptide
YDRLHPLSYPQTVGETYGKDITSRGKDKPIADVFLICFSL

SEQ ID NO: 1412 - protein, 40 aa, Artificial Sequence
  Description of Artificial Sequence: Synthetic polypeptide
LHPLSYPQTVGETYGKDITSRGKDKPIADVFLICFSLVSP

SEQ ID NO: 1413 - protein, 40 aa, Artificial Sequence
  Description of Artificial Sequence: Synthetic polypeptide
LASILLRIFLHEKLESLLLCTLNDREISMEDEATTLFLAT

SEQ ID NO: 1414 - protein, 40 aa, Artificial Sequence
  Description of Artificial Sequence: Synthetic polypeptide
LLLCTLNDREISMEDEATTLFLATTLASTLMEQYMKATAT

SEQ ID NO: 1415 - protein, 40 aa, Artificial Sequence
  Description of Artificial Sequence: Synthetic polypeptide
CTLNDREISMEDEATTLFLATTLASTLMEQYMKATATQFV

SEQ ID NO: 1416 - protein, 40 aa, Artificial Sequence
  Description of Artificial Sequence: Synthetic polypeptide
EDEATTLFLATTLASTLMEQYMKATATQFVHHALKDSILK

SEQ ID NO: 1417 - protein, 40 aa, Artificial Sequence
  Description of Artificial Sequence: Synthetic polypeptide
TLFLATTLASTLMEQYMKATATQFVHHALKDSILKIMESK

SEQ ID NO: 1418 - protein, 40 aa, Artificial Sequence
  Description of Artificial Sequence: Synthetic polypeptide
KAFDFYKVIESFIKAEGNLTREMIKHLERCEHRIMESLAS

SEQ ID NO: 1419 - protein, 40 aa, Artificial Sequence
  Description of Artificial Sequence: Synthetic polypeptide
SFIKAEGNLTREMIKHLERCEHRIMESLASLSDSPLFDLI

SEQ ID NO: 1420 - protein, 40 aa, Artificial Sequence
  Description of Artificial Sequence: Synthetic polypeptide
FIKAEGNLTREMIKHLERCEHRIMESLASLSDSPLFDLIK

SEQ ID NO: 1421 - protein, 40 aa, Artificial Sequence
  Description of Artificial Sequence: Synthetic polypeptide
IKAEGNLTREMIKHLERCEHRIMESLASLSDSPLFDLIKQ

SEQ ID NO: 1422 - protein, 40 aa, Artificial Sequence
  Description of Artificial Sequence: Synthetic polypeptide
MIKHLERCEHRIMESLASLSDSPLFDLIKQSKDREGPTDH

SEQ ID NO: 1423 - protein, 40 aa, Artificial Sequence
  Description of Artificial Sequence: Synthetic polypeptide
HLERCEHRIMESLASLSDSPLFDLIKQSKDREGPTDHLES

SEQ ID NO: 1424 - protein, 40 aa, Artificial Sequence
  Description of Artificial Sequence: Synthetic polypeptide
CEHRIMESLASLSDSPLFDLIKQSKDREGPTDHLESACPL

SEQ ID NO: 1425 - protein, 40 aa, Artificial Sequence
  Description of Artificial Sequence: Synthetic polypeptide
SLTIQFVEGQFVDSYDPTIENTFTKLITVNGQEYHLQLVV

SEQ ID NO: 1426 - protein, 40 aa, Artificial Sequence
  Description of Artificial Sequence: Synthetic polypeptide
KLITVNGQEYHLQLVVTAGQDEYSIFPQTYSIDINGYILV

SEQ ID NO: 1427 - protein, 40 aa, Artificial Sequence
  Description of Artificial Sequence: Synthetic polypeptide
VNGQEYHLQLVVTAGQDEYSIFPQTYSIDINGYILVYSVT

SEQ ID NO: 1428 - protein, 40 aa, Artificial Sequence
  Description of Artificial Sequence: Synthetic polypeptide
QEYHLQLVVTAGQDEYSIFPQTYSIDINGYILVYSVTSIK

SEQ ID NO: 1429 - protein, 40 aa, Artificial Sequence
  Description of Artificial Sequence: Synthetic polypeptide
QLVVTAGQDEYSIFPQTYSIDINGYILVYSVTSIKSFEVI

SEQ ID NO: 1430 - protein, 40 aa, Artificial Sequence
  Description of Artificial Sequence: Synthetic polypeptide
LVVTAGQDEYSIFPQTYSIDINGYILVYSVTSIKSFEVIK

SEQ ID NO: 1431 - protein, 40 aa, Artificial Sequence
  Description of Artificial Sequence: Synthetic polypeptide
VVTAGQDEYSIFPQTYSIDINGYILVYSVTSIKSFEVIKV

SEQ ID NO: 1432 - protein, 40 aa, Artificial Sequence
  Description of Artificial Sequence: Synthetic polypeptide
VTAGQDEYSIFPQTYSIDINGYILVYSVTSIKSFEVIKVI

SEQ ID NO: 1433 - protein, 40 aa, Artificial Sequence
  Description of Artificial Sequence: Synthetic polypeptide
DEHTRRELAKMKQEPVKPEEGRDMANRIGAFGYMECSTKT

SEQ ID NO: 1434 - protein, 40 aa, Artificial Sequence
  Description of Artificial Sequence: Synthetic polypeptide
RRELAKMKQEPVKPEEGRDMANRIGAFGYMECSTKTKDGV

SEQ ID NO: 1435 - protein, 40 aa, Artificial Sequence
  Description of Artificial Sequence: Synthetic polypeptide
KMKQEPVKPEEGRDMANRIGAFGYMECSTKTKDGVREVFE

SEQ ID NO: 1436 - protein, 40 aa, Artificial Sequence
  Description of Artificial Sequence: Synthetic polypeptide
AAIRKKLVIVGDGACAKTCLLIVFSKDQFPEVYVPTVFEN

SEQ ID NO: 1437 - protein, 40 aa, Artificial Sequence
  Description of Artificial Sequence: Synthetic polypeptide
AKTCLLIVFSKDQFPEVYVPTVFENYVADIEVDGKQVELA

SEQ ID NO: 1438 - protein, 40 aa, Artificial Sequence
  Description of Artificial Sequence: Synthetic polypeptide
GACGKTCLRIVFSKDQFPEVYVPTVFENYVADIEVDGKQV

SEQ ID NO: 1439 - protein, 40 aa, Artificial Sequence
  Description of Artificial Sequence: Synthetic polypeptide
KTCLRIVFSKDQFPEVYVPTVFENYVADIEVDGKQVELAL

SEQ ID NO: 1440 - protein, 40 aa, Artificial Sequence
  Description of Artificial Sequence: Synthetic polypeptide
LRIVFSKDQFPEVYVPTVFENYVADIEVDGKQVELALWDT

SEQ ID NO: 1441 - protein, 40 aa, Artificial Sequence
  Description of Artificial Sequence: Synthetic polypeptide
RIVFSKDQFPEVYVPTVFENYVADIEVDGKQVELALWDTA

SEQ ID NO: 1442 - protein, 40 aa, Artificial Sequence
  Description of Artificial Sequence: Synthetic polypeptide
GDGACGKTCLLIVFSKDQFPEVYVPIVFENYVADIEVDGK

SEQ ID NO: 1443 - protein, 40 aa, Artificial Sequence
  Description of Artificial Sequence: Synthetic polypeptide
GACGKTCLLIVFSKDQFPEVYVPIVFENYVADIEVDGKQV

SEQ ID NO: 1444 - protein, 40 aa, Artificial Sequence
  Description of Artificial Sequence: Synthetic polypeptide
LLIVFSKDQFPEVYVPIVFENYVADIEVDGKQVELALWDT

SEQ ID NO: 1445 - protein, 40 aa, Artificial Sequence
  Description of Artificial Sequence: Synthetic polypeptide
FSKDQFPEVYVPIVFENYVADIEVDGKQVELALWDTAGQE

SEQ ID NO: 1446 - protein, 40 aa, Artificial Sequence
  Description of Artificial Sequence: Synthetic polypeptide
GACGKTCLLIVFSKDQFPEVYVPTVFENCVADIEVDGKQV

SEQ ID NO: 1447 - protein, 40 aa, Artificial Sequence
  Description of Artificial Sequence: Synthetic polypeptide
LIVFSKDQFPEVYVPTVFENCVADIEVDGKQVELALWDTA

SEQ ID NO: 1448 - protein, 40 aa, Artificial Sequence
  Description of Artificial Sequence: Synthetic polypeptide
KDQFPEVYVPTVFENCVADIEVDGKQVELALWDTAGQEDY

SEQ ID NO: 1449 - protein, 40 aa, Artificial Sequence
  Description of Artificial Sequence: Synthetic polypeptide
QFPEVYVPTVFENCVADIEVDGKQVELALWDTAGQEDYDR

SEQ ID NO: 1450 - protein, 40 aa, Artificial Sequence
  Description of Artificial Sequence: Synthetic polypeptide
FPEVYVPTVFENCVADIEVDGKQVELALWDTAGQEDYDRL

SEQ ID NO: 1451 - protein, 40 aa, Artificial Sequence
  Description of Artificial Sequence: Synthetic polypeptide
KTCLLIVFSKDQFPEVYVPTVFENYVADIKVDGKQVELAL

SEQ ID NO: 1452 - protein, 40 aa, Artificial Sequence
  Description of Artificial Sequence: Synthetic polypeptide
VFSKDQFPEVYVPTVFENYVADIKVDGKQVELALWDTAGQ

SEQ ID NO: 1453 - protein, 40 aa, Artificial Sequence
  Description of Artificial Sequence: Synthetic polypeptide
FSKDQFPEVYVPTVFENYVADIKVDGKQVELALWDTAGQE

SEQ ID NO: 1454 - protein, 40 aa, Artificial Sequence
  Description of Artificial Sequence: Synthetic polypeptide
KDQFPEVYVPTVFENYVADIKVDGKQVELALWDTAGQEDY

SEQ ID NO: 1455 - protein, 40 aa, Artificial Sequence
  Description of Artificial Sequence: Synthetic polypeptide
FPEVYVPTVFENYVADIKVDGKQVELALWDTAGQEDYDRL

SEQ ID NO: 1456 - protein, 40 aa, Artificial Sequence
  Description of Artificial Sequence: Synthetic polypeptide
PEVYVPTVFENYVADIKVDGKQVELALWDTAGQEDYDRLR

SEQ ID NO: 1457 - protein, 40 aa, Artificial Sequence
  Description of Artificial Sequence: Synthetic polypeptide
ENYVADIKVDGKQVELALWDTAGQEDYDRLRPLSYPDTDV

SEQ ID NO: 1458 - protein, 40 aa, Artificial Sequence
  Description of Artificial Sequence: Synthetic polypeptide
ADIKVDGKQVELALWDTAGQEDYDRLRPLSYPDTDVILMC

SEQ ID NO: 1459 - protein, 40 aa, Artificial Sequence
  Description of Artificial Sequence: Synthetic polypeptide
VFSKDQFPEVYVPTVFENYVADIEVDGKQVELALWGTAGQ

SEQ ID NO: 1460 - protein, 40 aa, Artificial Sequence
  Description of Artificial Sequence: Synthetic polypeptide
PEVYVPTVFENYVADIEVDGKQVELALWGTAGQEDYDRLR

SEQ ID NO: 1461 - protein, 40 aa, Artificial Sequence
  Description of Artificial Sequence: Synthetic polypeptide
VYVPTVFENYVADIEVDGKQVELALWGTAGQEDYDRLRPL

SEQ ID NO: 1462 - protein, 40 aa, Artificial Sequence
  Description of Artificial Sequence: Synthetic polypeptide
EVDGKQVELALWGTAGQEDYDRLRPLSYPDTDVILMCFSI

SEQ ID NO: 1463 - protein, 40 aa, Artificial Sequence
  Description of Artificial Sequence: Synthetic polypeptide
VFSKDQFPEVYVPTVFENYVADIEVDGKQVELALWYTAGQ

SEQ ID NO: 1464 - protein, 40 aa, Artificial Sequence
  Description of Artificial Sequence: Synthetic polypeptide
PEVYVPTVFENYVADIEVDGKQVELALWYTAGQEDYDRLR

SEQ ID NO: 1465 - protein, 40 aa, Artificial Sequence
  Description of Artificial Sequence: Synthetic polypeptide
VYVPTVFENYVADIEVDGKQVELALWYTAGQEDYDRLRPL

SEQ ID NO: 1466 - protein, 40 aa, Artificial Sequence
  Description of Artificial Sequence: Synthetic polypeptide
VPTVFENYVADIEVDGKQVELALWYTAGQEDYDRLRPLSY

SEQ ID NO: 1467 - protein, 40 aa, Artificial Sequence
  Description of Artificial Sequence: Synthetic polypeptide
ENYVADIEVDGKQVELALWYTAGQEDYDRLRPLSYPDTDV

SEQ ID NO: 1468 - protein, 40 aa, Artificial Sequence
  Description of Artificial Sequence: Synthetic polypeptide
YVADIEVDGKQVELALWYTAGQEDYDRLRPLSYPDTDVIL

SEQ ID NO: 1469 - protein, 40 aa, Artificial Sequence
  Description of Artificial Sequence: Synthetic polypeptide
ADIEVDGKQVELALWYTAGQEDYDRLRPLSYPDTDVILMC

SEQ ID NO: 1470 - protein, 40 aa, Artificial Sequence
  Description of Artificial Sequence: Synthetic polypeptide
EVDGKQVELALWYTAGQEDYDRLRPLSYPDTDVILMCFSI

SEQ ID NO: 1471 - protein, 40 aa, Artificial Sequence
  Description of Artificial Sequence: Synthetic polypeptide
ALWYTAGQEDYDRLRPLSYPDTDVILMCFSIDSPDSLENI

SEQ ID NO: 1472 - protein, 40 aa, Artificial Sequence
  Description of Artificial Sequence: Synthetic polypeptide
LWYTAGQEDYDRLRPLSYPDTDVILMCFSIDSPDSLENIP

SEQ ID NO: 1473 - protein, 40 aa, Artificial Sequence
  Description of Artificial Sequence: Synthetic polypeptide
PEVYVPTVFENYVADIEVDGKQVELALWDKAGQEDYDRLR

SEQ ID NO: 1474 - protein, 40 aa, Artificial Sequence
  Description of Artificial Sequence: Synthetic polypeptide
EVYVPTVFENYVADIEVDGKQVELALWDKAGQEDYDRLRP

SEQ ID NO: 1475 - protein, 40 aa, Artificial Sequence
  Description of Artificial Sequence: Synthetic polypeptide
VPTVFENYVADIEVDGKQVELALWDKAGQEDYDRLRPLSY

SEQ ID NO: 1476 - protein, 40 aa, Artificial Sequence
  Description of Artificial Sequence: Synthetic polypeptide
VFENYVADIEVDGKQVELALWDKAGQEDYDRLRPLSYPDT

SEQ ID NO: 1477 - protein, 40 aa, Artificial Sequence
  Description of Artificial Sequence: Synthetic polypeptide
ENYVADIEVDGKQVELALWDKAGQEDYDRLRPLSYPDTDV

SEQ ID NO: 1478 - protein, 40 aa, Artificial Sequence
  Description of Artificial Sequence: Synthetic polypeptide
ADIEVDGKQVELALWDKAGQEDYDRLRPLSYPDTDVILMC

SEQ ID NO: 1479 - protein, 40 aa, Artificial Sequence
  Description of Artificial Sequence: Synthetic polypeptide
DKAGQEDYDRLRPLSYPDTDVILMCFSIDSPDSLENIPEK

SEQ ID NO: 1480 - protein, 40 aa, Artificial Sequence
  Description of Artificial Sequence: Synthetic polypeptide
LIVFSKDQFPEVYVPTVFENYVADIEVDGKQVELALWDTD

SEQ ID NO: 1481 - protein, 40 aa, Artificial Sequence
  Description of Artificial Sequence: Synthetic polypeptide
FSKDQFPEVYVPTVFENYVADIEVDGKQVELALWDTDGQE

SEQ ID NO: 1482 - protein, 40 aa, Artificial Sequence
  Description of Artificial Sequence: Synthetic polypeptide
KDQFPEVYVPTVFENYVADIEVDGKQVELALWDTDGQEDY

SEQ ID NO: 1483 - protein, 40 aa, Artificial Sequence
  Description of Artificial Sequence: Synthetic polypeptide
VPTVFENYVADIEVDGKQVELALWDTDGQEDYDRLRPLSY

SEQ ID NO: 1484 - protein, 40 aa, Artificial Sequence
  Description of Artificial Sequence: Synthetic polypeptide
YVADIEVDGKQVELALWDTDGQEDYDRLRPLSYPDTDVIL

SEQ ID NO: 1485 - protein, 40 aa, Artificial Sequence
  Description of Artificial Sequence: Synthetic polypeptide
ADIEVDGKQVELALWDTDGQEDYDRLRPLSYPDTDVILMC

SEQ ID NO: 1486 - protein, 40 aa, Artificial Sequence
  Description of Artificial Sequence: Synthetic polypeptide
LWDTDGQEDYDRLRPLSYPDTDVILMCFSIDSPDSLENIP

SEQ ID NO: 1487 - protein, 40 aa, Artificial Sequence
  Description of Artificial Sequence: Synthetic polypeptide
WDTDGQEDYDRLRPLSYPDTDVILMCFSIDSPDSLENIPE

SEQ ID NO: 1488 - protein, 40 aa, Artificial Sequence
  Description of Artificial Sequence: Synthetic polypeptide
QFPEVYVPTVFENYVADIEVDGKQVELALWDTAEQEDYDR

SEQ ID NO: 1489 - protein, 40 aa, Artificial Sequence
  Description of Artificial Sequence: Synthetic polypeptide
FPEVYVPTVFENYVADIEVDGKQVELALWDTAEQEDYDRL

SEQ ID NO: 1490 - protein, 40 aa, Artificial Sequence
  Description of Artificial Sequence: Synthetic polypeptide
QVELALWDTAEQEDYDRLRPLSYPDTDVILMCFSIDSPDS

SEQ ID NO: 1491 - protein, 40 aa, Artificial Sequence
  Description of Artificial Sequence: Synthetic polypeptide
DQFPEVYVPTVFENYVADIEVDGKQVELALWDTARQEDYD

SEQ ID NO: 1492 - protein, 40 aa, Artificial Sequence
  Description of Artificial Sequence: Synthetic polypeptide
ENYVADIEVDGKQVELALWDTARQEDYDRLRPLSYPDTDV

SEQ ID NO: 1493 - protein, 40 aa, Artificial Sequence
  Description of Artificial Sequence: Synthetic polypeptide
YVADIEVDGKQVELALWDTARQEDYDRLRPLSYPDTDVIL

SEQ ID NO: 1494 - protein, 40 aa, Artificial Sequence
  Description of Artificial Sequence: Synthetic polypeptide
VADIEVDGKQVELALWDTARQEDYDRLRPLSYPDTDVILM

SEQ ID NO: 1495 - protein, 40 aa, Artificial Sequence
  Description of Artificial Sequence: Synthetic polypeptide
ADIEVDGKQVELALWDTARQEDYDRLRPLSYPDTDVILMC

SEQ ID NO: 1496 - protein, 40 aa, Artificial Sequence
  Description of Artificial Sequence: Synthetic polypeptide
VYVPTVFENYVADIEVDGKQVELALWDTAGKEDYDRLRPL

SEQ ID NO: 1497 - protein, 40 aa, Artificial Sequence
  Description of Artificial Sequence: Synthetic polypeptide
VPTVFENYVADIEVDGKQVELALWDTAGKEDYDRLRPLSY

SEQ ID NO: 1498 - protein, 40 aa, Artificial Sequence
  Description of Artificial Sequence: Synthetic polypeptide
QVELALWDTAGKEDYDRLRPLSYPDTDVILMCFSIDSPDS

SEQ ID NO: 1499 - protein, 40 aa, Artificial Sequence
  Description of Artificial Sequence: Synthetic polypeptide
VPTVFENYVADIEVDGKQVELALWDTAGQEDYDRLSPLSY

SEQ ID NO: 1500 - protein, 40 aa, Artificial Sequence
  Description of Artificial Sequence: Synthetic polypeptide
PTVFENYVADIEVDGKQVELALWDTAGQEDYDRLSPLSYP

SEQ ID NO: 1501 - protein, 40 aa, Artificial Sequence
  Description of Artificial Sequence: Synthetic polypeptide
ENYVADIEVDGKQVELALWDTAGQEDYDRLSPLSYPDTDV

SEQ ID NO: 1502 - protein, 40 aa, Artificial Sequence
  Description of Artificial Sequence: Synthetic polypeptide
VADIEVDGKQVELALWDTAGQEDYDRLSPLSYPDTDVILM

SEQ ID NO: 1503 - protein, 40 aa, Artificial Sequence
  Description of Artificial Sequence: Synthetic polypeptide
EVDGKQVELALWDTAGQEDYDRLSPLSYPDTDVILMCFSI

SEQ ID NO: 1504 - protein, 40 aa, Artificial Sequence
  Description of Artificial Sequence: Synthetic polypeptide
NYVADIEVDGKQVELALWDTAGQEDYDRLRPLPYPDTDVI

SEQ ID NO: 1505 - protein, 40 aa, Artificial Sequence
  Description of Artificial Sequence: Synthetic polypeptide
VADIEVDGKQVELALWDTAGQEDYDRLRPLPYPDTDVILM

SEQ ID NO: 1506 - protein, 40 aa, Artificial Sequence
  Description of Artificial Sequence: Synthetic polypeptide
EVDGKQVELALWDTAGQEDYDRLRPLPYPDTDVILMCFSI

SEQ ID NO: 1507 - protein, 40 aa, Artificial Sequence
  Description of Artificial Sequence: Synthetic polypeptide
RPLPYPDTDVILMCFSIDSPDSLENIPEKWTPEVKHFCPN

SEQ ID NO: 1508 - protein, 40 aa, Artificial Sequence
  Description of Artificial Sequence: Synthetic polypeptide
PLPYPDTDVILMCFSIDSPDSLENIPEKWTPEVKHFCPNV

SEQ ID NO: 1509 - protein, 40 aa, Artificial Sequence
  Description of Artificial Sequence: Synthetic polypeptide
PTIEDSYTKQCVIDDRAARLDILDTAGHEEFGAMREQYMR

SEQ ID NO: 1510 - protein, 40 aa, Artificial Sequence
  Description of Artificial Sequence: Synthetic polypeptide
TAGHEEFGAMREQYMRTGEGFLLVFSVTDRGSFEEIYKFQ

SEQ ID NO: 1511 - protein, 40 aa, Artificial Sequence
  Description of Artificial Sequence: Synthetic polypeptide
DDRAARLDILDTAGLEEFGAMREQYMRTGEGFLLVFSVTD

SEQ ID NO: 1512 - protein, 40 aa, Artificial Sequence
  Description of Artificial Sequence: Synthetic polypeptide
ARLDILDTAGLEEFGAMREQYMRTGEGFLLVFSVTDRGSF

SEQ ID NO: 1513 - protein, 40 aa, Artificial Sequence
  Description of Artificial Sequence: Synthetic polypeptide
DTAGLEEFGAMREQYMRTGEGFLLVFSVTDRGSFEEIYKF

SEQ ID NO: 1514 - protein, 40 aa, Artificial Sequence
  Description of Artificial Sequence: Synthetic polypeptide
GLEEFGAMREQYMRTGEGFLLVFSVTDRGSFEEIYKFQRQ

SEQ ID NO: 1515 - protein, 40 aa, Artificial Sequence
  Description of Artificial Sequence: Synthetic polypeptide
LVRTDSPNFLCSVLPTHWLCNKTLPIAFKVVALGDVPDGT

SEQ ID NO: 1516 - protein, 40 aa, Artificial Sequence
  Description of Artificial Sequence: Synthetic polypeptide
RTDSPNFLCSVLPTHWLCNKTLPIAFKVVALGDVPDGTLV

SEQ ID NO: 1517 - protein, 40 aa, Artificial Sequence
  Description of Artificial Sequence: Synthetic polypeptide
EVLADHPGELVRTDSPNFLCSVLPTHWRCNNTLPIAFKVV

SEQ ID NO: 1518 - protein, 40 aa, Artificial Sequence
  Description of Artificial Sequence: Synthetic polypeptide
ADHPGELVRTDSPNFLCSVLPTHWRCNNTLPIAFKVVALG

SEQ ID NO: 1519 - protein, 40 aa, Artificial Sequence
  Description of Artificial Sequence: Synthetic polypeptide
DERAQGEIACGEDCLNRLLMIECSSRCPNGDYCSNRQFQR

SEQ ID NO: 1520 - protein, 40 aa, Artificial Sequence
  Description of Artificial Sequence: Synthetic polypeptide
ERAQGEIACGEDCLNRLLMIECSSRCPNGDYCSNRQFQRK

SEQ ID NO: 1521 - protein, 40 aa, Artificial Sequence
  Description of Artificial Sequence: Synthetic polypeptide
RLLMIECSSRCPNGDYCSNRQFQRKQHADVEVILTEKKGW

SEQ ID NO: 1522 - protein, 40 aa, Artificial Sequence
  Description of Artificial Sequence: Synthetic polypeptide
LMIECSSRCPNGDYCSNRQFQRKQHADVEVILTEKKGWGL

SEQ ID NO: 1523 - protein, 40 aa, Artificial Sequence
  Description of Artificial Sequence: Synthetic polypeptide
CGEVLDHKEFKARVKEYARNKNIRYYFMALKNDEIIDATQ

SEQ ID NO: 1524 - protein, 40 aa, Artificial Sequence
  Description of Artificial Sequence: Synthetic polypeptide
VKEYARNKNIRYYFMALKNDEIIDATQKGNCSRFMNHSCE

SEQ ID NO: 1525 - protein, 40 aa, Artificial Sequence
  Description of Artificial Sequence: Synthetic polypeptide
NKNIHYYFMALKNDEIIDATQKGNCSCFMNHSCEPNCETQ

SEQ ID NO: 1526 - protein, 40 aa, Artificial Sequence
  Description of Artificial Sequence: Synthetic polypeptide
KNIHYYFMALKNDEIIDATQKGNCSCFMNHSCEPNCETQK

SEQ ID NO: 1527 - protein, 40 aa, Artificial Sequence
  Description of Artificial Sequence: Synthetic polypeptide
NCSCFMNHSCEPNCETQKWTVNGQLRVGFFTTKLVPSGSE

SEQ ID NO: 1528 - protein, 40 aa, Artificial Sequence
  Description of Artificial Sequence: Synthetic polypeptide
ALKNDEIIDATQKGNCSLFMNHSCEPNCETQKWTVNGQLR

SEQ ID NO: 1529 - protein, 40 aa, Artificial Sequence
  Description of Artificial Sequence: Synthetic polypeptide
LFMNHSCEPNCETQKWTVNGQLRVGFFTTKLVPSGSELTF

SEQ ID NO: 1530 - protein, 40 aa, Artificial Sequence
  Description of Artificial Sequence: Synthetic polypeptide
YARNKNIHYYFMALKNDEIIDATQKGNCSRFMTHSCEPNC

SEQ ID NO: 1531 - protein, 40 aa, Artificial Sequence
  Description of Artificial Sequence: Synthetic polypeptide
RNKNIHYYFMALKNDEIIDATQKGNCSRFMTHSCEPNCET

SEQ ID NO: 1532 - protein, 40 aa, Artificial Sequence
  Description of Artificial Sequence: Synthetic polypeptide
NKNIHYYFMALKNDEIIDATQKGNCSRFMTHSCEPNCETQ

SEQ ID NO: 1533 - protein, 40 aa, Artificial Sequence
  Description of Artificial Sequence: Synthetic polypeptide
YARVEGREIISNLAKAAGLATMISTMRPDIDNMDEYVCNT

SEQ ID NO: 1534 - protein, 40 aa, Artificial Sequence
  Description of Artificial Sequence: Synthetic polypeptide
GREIISNLAKAAGLATMISTMRPDIDNMDEYVCNTTARAF

SEQ ID NO: 1535 - protein, 40 aa, Artificial Sequence
  Description of Artificial Sequence: Synthetic polypeptide
DEYVCNTTARAFAVVASALGIPSLLPFLKAVCKSKKSWQA

SEQ ID NO: 1536 - protein, 40 aa, Artificial Sequence
  Description of Artificial Sequence: Synthetic polypeptide
ARVEGREIISNLAKAAGLATMISTMRPDIDNMDEYVHNTT

SEQ ID NO: 1537 - protein, 40 aa, Artificial Sequence
  Description of Artificial Sequence: Synthetic polypeptide
EGREIISNLAKAAGLATMISTMRPDIDNMDEYVHNTTARA

SEQ ID NO: 1538 - protein, 40 aa, Artificial Sequence
  Description of Artificial Sequence: Synthetic polypeptide
ISNLAKAAGLATMISTMRPDIDNMDEYVHNTTARAFAVVA

SEQ ID NO: 1539 - protein, 40 aa, Artificial Sequence
  Description of Artificial Sequence: Synthetic polypeptide
STMRPDIDNMDEYVHNTTARAFAVVASALGIPSLLPFLKA

SEQ ID NO: 1540 - protein, 40 aa, Artificial Sequence
  Description of Artificial Sequence: Synthetic polypeptide
LATMISTMRPDIDNMDEYVRYTTARAFAVVASALGIPSLL

SEQ ID NO: 1541 - protein, 40 aa, Artificial Sequence
  Description of Artificial Sequence: Synthetic polypeptide
ATMISTMRPDIDNMDEYVRYTTARAFAVVASALGIPSLLP

SEQ ID NO: 1542 - protein, 40 aa, Artificial Sequence
  Description of Artificial Sequence: Synthetic polypeptide
PDIDNMDEYVRYTTARAFAVVASALGIPSLLPFLKAVCKS

SEQ ID NO: 1543 - protein, 40 aa, Artificial Sequence
  Description of Artificial Sequence: Synthetic polypeptide
ARHTGIEIVQQIAILMGCAILPHLRSLVEIIEHGLVDEQQ

SEQ ID NO: 1544 - protein, 40 aa, Artificial Sequence
  Description of Artificial Sequence: Synthetic polypeptide
EIVQQIAILMGCAILPHLRSLVEIIEHGLVDEQQKVRTIS

SEQ ID NO: 1545 - protein, 40 aa, Artificial Sequence
  Description of Artificial Sequence: Synthetic polypeptide
KSWQARHTGINIVQQIAILMGCAILPHLRSLVEIIEHGLV

SEQ ID NO: 1546 - protein, 40 aa, Artificial Sequence
  Description of Artificial Sequence: Synthetic polypeptide
QARHTGINIVQQIAILMGCAILPHLRSLVEIIEHGLVDEQ

SEQ ID NO: 1547 - protein, 40 aa, Artificial Sequence
  Description of Artificial Sequence: Synthetic polypeptide
RHTGINIVQQIAILMGCAILPHLRSLVEIIEHGLVDEQQK

SEQ ID NO: 1548 - protein, 40 aa, Artificial Sequence
  Description of Artificial Sequence: Synthetic polypeptide
KSWQARHTGITIVQQIAILMGCAILPHLRSLVEIIEHGLV

SEQ ID NO: 1549 - protein, 40 aa, Artificial Sequence
  Description of Artificial Sequence: Synthetic polypeptide
WQARHTGITIVQQIAILMGCAILPHLRSLVEIIEHGLVDE

SEQ ID NO: 1550 - protein, 40 aa, Artificial Sequence
  Description of Artificial Sequence: Synthetic polypeptide
ARHTGITIVQQIAILMGCAILPHLRSLVEIIEHGLVDEQQ

SEQ ID NO: 1551 - protein, 40 aa, Artificial Sequence
  Description of Artificial Sequence: Synthetic polypeptide
GITIVQQIAILMGCAILPHLRSLVEIIEHGLVDEQQKVRT

SEQ ID NO: 1552 - protein, 40 aa, Artificial Sequence
  Description of Artificial Sequence: Synthetic polypeptide
RHTGIKIVQQIAILMGCAILPHLRSLVEIIEHGLVDEQQE

SEQ ID NO: 1553 - protein, 40 aa, Artificial Sequence
  Description of Artificial Sequence: Synthetic polypeptide
GLVDEQQEVRTISALAIAALAEAATPYGIESFDSVLKPLW

SEQ ID NO: 1554 - protein, 40 aa, Artificial Sequence
  Description of Artificial Sequence: Synthetic polypeptide
LVDEQQEVRTISALAIAALAEAATPYGIESFDSVLKPLWK

SEQ ID NO: 1555 - protein, 40 aa, Artificial Sequence
  Description of Artificial Sequence: Synthetic polypeptide
IAALAEAATPYGIESFDSVLKPLWKGIRQHRGEGLAAFLK

SEQ ID NO: 1556 - protein, 40 aa, Artificial Sequence
  Description of Artificial Sequence: Synthetic polypeptide
AEAATPYGIESFDSVLKPLWKGIRQHRGEGLAAFLKAIGY

SEQ ID NO: 1557 - protein, 40 aa, Artificial Sequence
  Description of Artificial Sequence: Synthetic polypeptide
EAATPYGIESFDSVLKPLWKGIRQHRGEGLAAFLKAIGYL

SEQ ID NO: 1558 - protein, 40 aa, Artificial Sequence
  Description of Artificial Sequence: Synthetic polypeptide
AATPYGIESFDSVLKPLWKGIRQHRGEGLAAFLKAIGYLI

SEQ ID NO: 1559 - protein, 40 aa, Artificial Sequence
  Description of Artificial Sequence: Synthetic polypeptide
TPYGIESFDSVLKPLWKGIRQHRGEGLAAFLKAIGYLIPL

SEQ ID NO: 1560 - protein, 40 aa, Artificial Sequence
  Description of Artificial Sequence: Synthetic polypeptide
YGIESFDSVLKPLWKGIRQHRGEGLAAFLKAIGYLIPLMD

SEQ ID NO: 1561 - protein, 40 aa, Artificial Sequence
  Description of Artificial Sequence: Synthetic polypeptide
IESFDSVLKPLWKGIRQHRGEGLAAFLKAIGYLIPLMDAE

SEQ ID NO: 1562 - protein, 40 aa, Artificial Sequence
  Description of Artificial Sequence: Synthetic polypeptide
SVLKPLWKGIRQHRGEGLAAFLKAIGYLIPLMDAEYANYY

SEQ ID NO: 1563 - protein, 40 aa, Artificial Sequence
  Description of Artificial Sequence: Synthetic polypeptide
PLWKGIRQHRGEGLAAFLKAIGYLIPLMDAEYANYYTREV

SEQ ID NO: 1564 - protein, 40 aa, Artificial Sequence
  Description of Artificial Sequence: Synthetic polypeptide
GIRQHRGEGLAAFLKAIGYLIPLMDAEYANYYTREVMLIL

SEQ ID NO: 1565 - protein, 40 aa, Artificial Sequence
  Description of Artificial Sequence: Synthetic polypeptide
RQHRGEGLAAFLKAIGYLIPLMDAEYANYYTREVMLILIR

SEQ ID NO: 1566 - protein, 40 aa, Artificial Sequence
  Description of Artificial Sequence: Synthetic polypeptide
GEGLAAFLKAIGYLIPLMDAEYANYYTREVMLILIREFQS

SEQ ID NO: 1567 - protein, 40 aa, Artificial Sequence
  Description of Artificial Sequence: Synthetic polypeptide
EGLAAFLKAIGYLIPLMDAEYANYYTREVMLILIREFQSP

SEQ ID NO: 1568 - protein, 40 aa, Artificial Sequence
  Description of Artificial Sequence: Synthetic polypeptide
GKGLAAVLKAIGYLIPLMDAEYANYYTREVMLILIREFQS

SEQ ID NO: 1569 - protein, 40 aa, Artificial Sequence
  Description of Artificial Sequence: Synthetic polypeptide
GLAAVLKAIGYLIPLMDAEYANYYTREVMLILIREFQSPD

SEQ ID NO: 1570 - protein, 40 aa, Artificial Sequence
  Description of Artificial Sequence: Synthetic polypeptide
LAAVLKAIGYLIPLMDAEYANYYTREVMLILIREFQSPDE

SEQ ID NO: 1571 - protein, 40 aa, Artificial Sequence
  Description of Artificial Sequence: Synthetic polypeptide
ISRIVDDLKDEAKQYRKMVMETIEKIMGNLGAADIDHKLE

SEQ ID NO: 1572 - protein, 40 aa, Artificial Sequence
  Description of Artificial Sequence: Synthetic polypeptide
VDDLKDEAKQYRKMVMETIEKIMGNLGAADIDHKLEEQLI

SEQ ID NO: 1573 - protein, 40 aa, Artificial Sequence
  Description of Artificial Sequence: Synthetic polypeptide
LKDEAKQYRKMVMETIEKIMGNLGAADIDHKLEEQLIDGI

SEQ ID NO: 1574 - protein, 40 aa, Artificial Sequence
  Description of Artificial Sequence: Synthetic polypeptide
EAKQYRKMVMETIEKIMGNLGAADIDHKLEEQLIDGILYA

SEQ ID NO: 1575 - protein, 40 aa, Artificial Sequence
  Description of Artificial Sequence: Synthetic polypeptide
QYRKMVMETIEKIMGNLGAADIDHKLEEQLIDGILYAFQG

SEQ ID NO: 1576 - protein, 40 aa, Artificial Sequence
  Description of Artificial Sequence: Synthetic polypeptide
KMVMETIEKIMGNLGAADIDHKLEEQLIDGILYAFQGQTT

SEQ ID NO: 1577 - protein, 40 aa, Artificial Sequence
  Description of Artificial Sequence: Synthetic polypeptide
MVMETIEKIMGNLGAADIDHKLEEQLIDGILYAFQGQTTE

SEQ ID NO: 1578 - protein, 40 aa, Artificial Sequence
  Description of Artificial Sequence: Synthetic polypeptide
AADIDHKLEEQLIDGILYAFQGQTTEDSVMLNGFGTVVNA

SEQ ID NO: 1579 - protein, 40 aa, Artificial Sequence
  Description of Artificial Sequence: Synthetic polypeptide
LEEQLIDGILYAFQGQTTEDSVMLNGFGTVVNALGKRVKP

SEQ ID NO: 1580 - protein, 40 aa, Artificial Sequence
  Description of Artificial Sequence: Synthetic polypeptide
QLIDGILYAFQGQTTEDSVMLNGFGTVVNALGKRVKPYLP

SEQ ID NO: 1581 - protein, 40 aa, Artificial Sequence
  Description of Artificial Sequence: Synthetic polypeptide
GILYAFQGQTTEDSVMLNGFGTVVNALGKRVKPYLPQICG

SEQ ID NO: 1582 - protein, 40 aa, Artificial Sequence
  Description of Artificial Sequence: Synthetic polypeptide
KMVMETIEKIMGNLGAADIDHKLEEQLIDGILYAFQKQTT

SEQ ID NO: 1583 - protein, 40 aa, Artificial Sequence
  Description of Artificial Sequence: Synthetic polypeptide
METIEKIMGNLGAADIDHKLEEQLIDGILYAFQKQTTEDS

SEQ ID NO: 1584 - protein, 40 aa, Artificial Sequence
  Description of Artificial Sequence: Synthetic polypeptide
ETIEKIMGNLGAADIDHKLEEQLIDGILYAFQKQTTEDSV

SEQ ID NO: 1585 - protein, 40 aa, Artificial Sequence
  Description of Artificial Sequence: Synthetic polypeptide
IEKIMGNLGAADIDHKLEEQLIDGILYAFQKQTTEDSVML

SEQ ID NO: 1586 - protein, 40 aa, Artificial Sequence
  Description of Artificial Sequence: Synthetic polypeptide
GILYAFQKQTTEDSVMLNGFGTVVNALGKRVKPYLPQICG

SEQ ID NO: 1587 - protein, 40 aa, Artificial Sequence
  Description of Artificial Sequence: Synthetic polypeptide
ETIEKIMGNLGAADIDHKLEEQLIDGILYAFQEPTTEDSV

SEQ ID NO: 1588 - protein, 40 aa, Artificial Sequence
  Description of Artificial Sequence: Synthetic polypeptide
EQLIDGILYAFQEPTTEDSVMLNGFGTVVNALGKRVKPYL

SEQ ID NO: 1589 - protein, 40 aa, Artificial Sequence
  Description of Artificial Sequence: Synthetic polypeptide
EPTTEDSVMLNGFGTVVNALGKRVKPYLPQICGTVLWRLN

SEQ ID NO: 1590 - protein, 40 aa, Artificial Sequence
  Description of Artificial Sequence: Synthetic polypeptide
RRQTVTSTPCWIELHLNGPLQWLEKVLTQMGSPSVRCSSM

SEQ ID NO: 1591 - protein, 40 aa, Artificial Sequence
  Description of Artificial Sequence: Synthetic polypeptide
EYRRQTVTSTPCWIELHLNGPLQWLNKVLTQMGSPSVRCS

SEQ ID NO: 1592 - protein, 40 aa, Artificial Sequence
  Description of Artificial Sequence: Synthetic polypeptide
YWPVHNELAFQPPISNHPAPEYWCSIAYFEMDVQVGETLK

SEQ ID NO: 1593 - protein, 40 aa, Artificial Sequence
  Description of Artificial Sequence: Synthetic polypeptide
VHNELAFQPPISNHPAPEYWCSIAYFEMDVQVGETLKVPS

SEQ ID NO: 1594 - protein, 40 aa, Artificial Sequence
  Description of Artificial Sequence: Synthetic polypeptide
AFQPPISNHPAPEYWCSIAYFEMDVQVGETLKVPSSCPIV

SEQ ID NO: 1595 - protein, 40 aa, Artificial Sequence
  Description of Artificial Sequence: Synthetic polypeptide
FQPPISNHPAPEYWCSIAYFEMDVQVGETLKVPSSCPIVT

SEQ ID NO: 1596 - protein, 40 aa, Artificial Sequence
  Description of Artificial Sequence: Synthetic polypeptide
PAPEYWCSIAYFEMDVQVGETLKVPSSCPIVTVDGYVDPS

SEQ ID NO: 1597 - protein, 40 aa, Artificial Sequence
  Description of Artificial Sequence: Synthetic polypeptide
CSIAYFEMDVQVGETLKVPSSCPIVTVDGYVDPSGGDRFC

SEQ ID NO: 1598 - protein, 40 aa, Artificial Sequence
  Description of Artificial Sequence: Synthetic polypeptide
FEMDVQVGETLKVPSSCPIVTVDGYVDPSGGDRFCLGQLS

SEQ ID NO: 1599 - protein, 40 aa, Artificial Sequence
  Description of Artificial Sequence: Synthetic polypeptide
LKVPSSCPIVTVDGYVDPSGGDRFCLGQLSNVHRTEAIER

SEQ ID NO: 1600 - protein, 40 aa, Artificial Sequence
  Description of Artificial Sequence: Synthetic polypeptide
PPISNHPAPEYWCSIAYFEMDVQVGETFKVPSSCPIVTVG

SEQ ID NO: 1601 - protein, 40 aa, Artificial Sequence
  Description of Artificial Sequence: Synthetic polypeptide
ISNHPAPEYWCSIAYFEMDVQVGETFKVPSSCPIVTVGGY

SEQ ID NO: 1602 - protein, 40 aa, Artificial Sequence
  Description of Artificial Sequence: Synthetic polypeptide
NHPAPEYWCSIAYFEMDVQVGETFKVPSSCPIVTVGGYVD

SEQ ID NO: 1603 - protein, 40 aa, Artificial Sequence
  Description of Artificial Sequence: Synthetic polypeptide
CSIAYFEMDVQVGETFKVPSSCPIVTVGGYVDPSGGDRFC

SEQ ID NO: 1604 - protein, 40 aa, Artificial Sequence
  Description of Artificial Sequence: Synthetic polypeptide
IAYFEMDVQVGETFKVPSSCPIVTVGGYVDPSGGDRFCLG

SEQ ID NO: 1605 - protein, 40 aa, Artificial Sequence
  Description of Artificial Sequence: Synthetic polypeptide
AYFEMDVQVGETFKVPSSCPIVTVGGYVDPSGGDRFCLGQ

SEQ ID NO: 1606 - protein, 40 aa, Artificial Sequence
  Description of Artificial Sequence: Synthetic polypeptide
VQVGETFKVPSSCPIVTVGGYVDPSGGDRFCLGQLSNVHR

SEQ ID NO: 1607 - protein, 40 aa, Artificial Sequence
  Description of Artificial Sequence: Synthetic polypeptide
SCPIVTVGGYVDPSGGDRFCLGQLSNVHRTEAIERARLHI

SEQ ID NO: 1608 - protein, 40 aa, Artificial Sequence
  Description of Artificial Sequence: Synthetic polypeptide
CPIVTVGGYVDPSGGDRFCLGQLSNVHRTEAIERARLHIG

SEQ ID NO: 1609 - protein, 40 aa, Artificial Sequence
  Description of Artificial Sequence: Synthetic polypeptide
PISNHPAPEYWCSIAYFEMDVQVGETFKVPSSCPIVTVHG

SEQ ID NO: 1610 - protein, 40 aa, Artificial Sequence
  Description of Artificial Sequence: Synthetic polypeptide
ISNHPAPEYWCSIAYFEMDVQVGETFKVPSSCPIVTVHGY

SEQ ID NO: 1611 - protein, 40 aa, Artificial Sequence
  Description of Artificial Sequence: Synthetic polypeptide
SNHPAPEYWCSIAYFEMDVQVGETFKVPSSCPIVTVHGYV

SEQ ID NO: 1612 - protein, 40 aa, Artificial Sequence
  Description of Artificial Sequence: Synthetic polypeptide
PEYWCSIAYFEMDVQVGETFKVPSSCPIVTVHGYVDPSGG

SEQ ID NO: 1613 - protein, 40 aa, Artificial Sequence
  Description of Artificial Sequence: Synthetic polypeptide
SIAYFEMDVQVGETFKVPSSCPIVTVHGYVDPSGGDRFCL

SEQ ID NO: 1614 - protein, 40 aa, Artificial Sequence
  Description of Artificial Sequence: Synthetic polypeptide
IAYFEMDVQVGETFKVPSSCPIVTVHGYVDPSGGDRFCLG

SEQ ID NO: 1615 - protein, 40 aa, Artificial Sequence
  Description of Artificial Sequence: Synthetic polypeptide
YFEMDVQVGETFKVPSSCPIVTVHGYVDPSGGDRFCLGQL

SEQ ID NO: 1616 - protein, 40 aa, Artificial Sequence
  Description of Artificial Sequence: Synthetic polypeptide
FEMDVQVGETFKVPSSCPIVTVHGYVDPSGGDRFCLGQLS

SEQ ID NO: 1617 - protein, 40 aa, Artificial Sequence
  Description of Artificial Sequence: Synthetic polypeptide
MDVQVGETFKVPSSCPIVTVHGYVDPSGGDRFCLGQLSNV

SEQ ID NO: 1618 - protein, 40 aa, Artificial Sequence
  Description of Artificial Sequence: Synthetic polypeptide
QVGETFKVPSSCPIVTVHGYVDPSGGDRFCLGQLSNVHRT

SEQ ID NO: 1619 - protein, 40 aa, Artificial Sequence
  Description of Artificial Sequence: Synthetic polypeptide
GETFKVPSSCPIVTVHGYVDPSGGDRFCLGQLSNVHRTEA

SEQ ID NO: 1620 - protein, 40 aa, Artificial Sequence
  Description of Artificial Sequence: Synthetic polypeptide
VPSSCPIVTVHGYVDPSGGDRFCLGQLSNVHRTEAIERAR

SEQ ID NO: 1621 - protein, 40 aa, Artificial Sequence
  Description of Artificial Sequence: Synthetic polypeptide
SCPIVTVHGYVDPSGGDRFCLGQLSNVHRTEAIERARLHI

SEQ ID NO: 1622 - protein, 40 aa, Artificial Sequence
  Description of Artificial Sequence: Synthetic polypeptide
SNHPAPEYWCSIAYFEMDVQVGETFKVPSSCPIVTVDRYV

SEQ ID NO: 1623 - protein, 40 aa, Artificial Sequence
  Description of Artificial Sequence: Synthetic polypeptide
APEYWCSIAYFEMDVQVGETFKVPSSCPIVTVDRYVDPSG

SEQ ID NO: 1624 - protein, 40 aa, Artificial Sequence
  Description of Artificial Sequence: Synthetic polypeptide
AYFEMDVQVGETFKVPSSCPIVTVDRYVDPSGGDRFCLGQ

SEQ ID NO: 1625 - protein, 40 aa, Artificial Sequence
  Description of Artificial Sequence: Synthetic polypeptide
EMDVQVGETFKVPSSCPIVTVDRYVDPSGGDRFCLGQLSN

SEQ ID NO: 1626 - protein, 40 aa, Artificial Sequence
  Description of Artificial Sequence: Synthetic polypeptide
MDVQVGETFKVPSSCPIVTVDRYVDPSGGDRFCLGQLSNV

SEQ ID NO: 1627 - protein, 40 aa, Artificial Sequence
  Description of Artificial Sequence: Synthetic polypeptide
DVQVGETFKVPSSCPIVTVDRYVDPSGGDRFCLGQLSNVH

SEQ ID NO: 1628 - protein, 40 aa, Artificial Sequence
  Description of Artificial Sequence: Synthetic polypeptide
VGETFKVPSSCPIVTVDRYVDPSGGDRFCLGQLSNVHRTE

SEQ ID NO: 1629 - protein, 40 aa, Artificial Sequence
  Description of Artificial Sequence: Synthetic polypeptide
VPSSCPIVTVDRYVDPSGGDRFCLGQLSNVHRTEAIERAR

SEQ ID NO: 1630 - protein, 40 aa, Artificial Sequence
  Description of Artificial Sequence: Synthetic polypeptide
ISNHPAPEYWCSIAYFEMDVQVGETFKVPSSCPIVTVDVY

SEQ ID NO: 1631 - protein, 40 aa, Artificial Sequence
  Description of Artificial Sequence: Synthetic polypeptide
APEYWCSIAYFEMDVQVGETFKVPSSCPIVTVDVYVDPSG

SEQ ID NO: 1632 - protein, 40 aa, Artificial Sequence
  Description of Artificial Sequence: Synthetic polypeptide
YWCSIAYFEMDVQVGETFKVPSSCPIVTVDVYVDPSGGDR

SEQ ID NO: 1633 - protein, 40 aa, Artificial Sequence
  Description of Artificial Sequence: Synthetic polypeptide
SIAYFEMDVQVGETFKVPSSCPIVTVDVYVDPSGGDRFCL

SEQ ID NO: 1634 - protein, 40 aa, Artificial Sequence
  Description of Artificial Sequence: Synthetic polypeptide
EMDVQVGETFKVPSSCPIVTVDVYVDPSGGDRFCLGQLSN

SEQ ID NO: 1635 - protein, 40 aa, Artificial Sequence
  Description of Artificial Sequence: Synthetic polypeptide
VQVGETFKVPSSCPIVTVDVYVDPSGGDRFCLGQLSNVHR

SEQ ID NO: 1636 - protein, 40 aa, Artificial Sequence
  Description of Artificial Sequence: Synthetic polypeptide
SNHPAPEYWCSIAYFEMDVQVGETFKVPSSCPIVTVDGCV

SEQ ID NO: 1637 - protein, 40 aa, Artificial Sequence
  Description of Artificial Sequence: Synthetic polypeptide
NHPAPEYWCSIAYFEMDVQVGETFKVPSSCPIVTVDGCVD

SEQ ID NO: 1638 - protein, 40 aa, Artificial Sequence
  Description of Artificial Sequence: Synthetic polypeptide
APEYWCSIAYFEMDVQVGETFKVPSSCPIVTVDGCVDPSG

SEQ ID NO: 1639 - protein, 40 aa, Artificial Sequence
  Description of Artificial Sequence: Synthetic polypeptide
EYWCSIAYFEMDVQVGETFKVPSSCPIVTVDGCVDPSGGD

SEQ ID NO: 1640 - protein, 40 aa, Artificial Sequence
  Description of Artificial Sequence: Synthetic polypeptide
YWCSIAYFEMDVQVGETFKVPSSCPIVTVDGCVDPSGGDR

SEQ ID NO: 1641 - protein, 40 aa, Artificial Sequence
  Description of Artificial Sequence: Synthetic polypeptide
WCSIAYFEMDVQVGETFKVPSSCPIVTVDGCVDPSGGDRF

SEQ ID NO: 1642 - protein, 40 aa, Artificial Sequence
  Description of Artificial Sequence: Synthetic polypeptide
IAYFEMDVQVGETFKVPSSCPIVTVDGCVDPSGGDRFCLG

SEQ ID NO: 1643 - protein, 40 aa, Artificial Sequence
  Description of Artificial Sequence: Synthetic polypeptide
YFEMDVQVGETFKVPSSCPIVTVDGCVDPSGGDRFCLGQL

SEQ ID NO: 1644 - protein, 40 aa, Artificial Sequence
  Description of Artificial Sequence: Synthetic polypeptide
DVQVGETFKVPSSCPIVTVDGCVDPSGGDRFCLGQLSNVH

SEQ ID NO: 1645 - protein, 40 aa, Artificial Sequence
  Description of Artificial Sequence: Synthetic polypeptide
VQVGETFKVPSSCPIVTVDGCVDPSGGDRFCLGQLSNVHR

SEQ ID NO: 1646 - protein, 40 aa, Artificial Sequence
  Description of Artificial Sequence: Synthetic polypeptide
GETFKVPSSCPIVTVDGCVDPSGGDRFCLGQLSNVHRTEA

SEQ ID NO: 1647 - protein, 40 aa, Artificial Sequence
  Description of Artificial Sequence: Synthetic polypeptide
CPIVTVDGCVDPSGGDRFCLGQLSNVHRTEAIERARLHIG

SEQ ID NO: 1648 - protein, 40 aa, Artificial Sequence
  Description of Artificial Sequence: Synthetic polypeptide
ISNHPAPEYWCSIAYFEMDVQVGETFKVPSSCPIVTVDGN

SEQ ID NO: 1649 - protein, 40 aa, Artificial Sequence
  Description of Artificial Sequence: Synthetic polypeptide
SNHPAPEYWCSIAYFEMDVQVGETFKVPSSCPIVTVDGNV

SEQ ID NO: 1650 - protein, 40 aa, Artificial Sequence
  Description of Artificial Sequence: Synthetic polypeptide
NHPAPEYWCSIAYFEMDVQVGETFKVPSSCPIVTVDGNVD

SEQ ID NO: 1651 - protein, 40 aa, Artificial Sequence
  Description of Artificial Sequence: Synthetic polypeptide
HPAPEYWCSIAYFEMDVQVGETFKVPSSCPIVTVDGNVDP

SEQ ID NO: 1652 - protein, 40 aa, Artificial Sequence
  Description of Artificial Sequence: Synthetic polypeptide
EYWCSIAYFEMDVQVGETFKVPSSCPIVTVDGNVDPSGGD

SEQ ID NO: 1653 - protein, 40 aa, Artificial Sequence
  Description of Artificial Sequence: Synthetic polypeptide
WCSIAYFEMDVQVGETFKVPSSCPIVTVDGNVDPSGGDRF

SEQ ID NO: 1654 - protein, 40 aa, Artificial Sequence
  Description of Artificial Sequence: Synthetic polypeptide
CSIAYFEMDVQVGETFKVPSSCPIVTVDGNVDPSGGDRFC

SEQ ID NO: 1655 - protein, 40 aa, Artificial Sequence
  Description of Artificial Sequence: Synthetic polypeptide
SIAYFEMDVQVGETFKVPSSCPIVTVDGNVDPSGGDRFCL

SEQ ID NO: 1656 - protein, 40 aa, Artificial Sequence
  Description of Artificial Sequence: Synthetic polypeptide
IAYFEMDVQVGETFKVPSSCPIVTVDGNVDPSGGDRFCLG

SEQ ID NO: 1657 - protein, 40 aa, Artificial Sequence
  Description of Artificial Sequence: Synthetic polypeptide
AYFEMDVQVGETFKVPSSCPIVTVDGNVDPSGGDRFCLGQ

SEQ ID NO: 1658 - protein, 40 aa, Artificial Sequence
  Description of Artificial Sequence: Synthetic polypeptide
EMDVQVGETFKVPSSCPIVTVDGNVDPSGGDRFCLGQLSN

SEQ ID NO: 1659 - protein, 40 aa, Artificial Sequence
  Description of Artificial Sequence: Synthetic polypeptide
MDVQVGETFKVPSSCPIVTVDGNVDPSGGDRFCLGQLSNV

SEQ ID NO: 1660 - protein, 40 aa, Artificial Sequence
  Description of Artificial Sequence: Synthetic polypeptide
DVQVGETFKVPSSCPIVTVDGNVDPSGGDRFCLGQLSNVH

SEQ ID NO: 1661 - protein, 40 aa, Artificial Sequence
  Description of Artificial Sequence: Synthetic polypeptide
NHPAPEYWCSIAYFEMDVQVGETFKVPSSCPIVTVDGYVV

SEQ ID NO: 1662 - protein, 40 aa, Artificial Sequence
  Description of Artificial Sequence: Synthetic polypeptide
HPAPEYWCSIAYFEMDVQVGETFKVPSSCPIVTVDGYVVP

SEQ ID NO: 1663 - protein, 40 aa, Artificial Sequence
  Description of Artificial Sequence: Synthetic polypeptide
APEYWCSIAYFEMDVQVGETFKVPSSCPIVTVDGYVVPSG

SEQ ID NO: 1664 - protein, 40 aa, Artificial Sequence
  Description of Artificial Sequence: Synthetic polypeptide
WCSIAYFEMDVQVGETFKVPSSCPIVTVDGYVVPSGGDRF

SEQ ID NO: 1665 - protein, 40 aa, Artificial Sequence
  Description of Artificial Sequence: Synthetic polypeptide
SIAYFEMDVQVGETFKVPSSCPIVTVDGYVVPSGGDRFCL

SEQ ID NO: 1666 - protein, 40 aa, Artificial Sequence
  Description of Artificial Sequence: Synthetic polypeptide
IAYFEMDVQVGETFKVPSSCPIVTVDGYVVPSGGDRFCLG

SEQ ID NO: 1667 - protein, 40 aa, Artificial Sequence
  Description of Artificial Sequence: Synthetic polypeptide
AYFEMDVQVGETFKVPSSCPIVTVDGYVVPSGGDRFCLGQ

SEQ ID NO: 1668 - protein, 40 aa, Artificial Sequence
  Description of Artificial Sequence: Synthetic polypeptide
FEMDVQVGETFKVPSSCPIVTVDGYVVPSGGDRFCLGQLS

SEQ ID NO: 1669 - protein, 40 aa, Artificial Sequence
  Description of Artificial Sequence: Synthetic polypeptide
MDVQVGETFKVPSSCPIVTVDGYVVPSGGDRFCLGQLSNV

SEQ ID NO: 1670 - protein, 40 aa, Artificial Sequence
  Description of Artificial Sequence: Synthetic polypeptide
VQVGETFKVPSSCPIVTVDGYVVPSGGDRFCLGQLSNVHR

SEQ ID NO: 1671 - protein, 40 aa, Artificial Sequence
  Description of Artificial Sequence: Synthetic polypeptide
PAPEYWCSIAYFEMDVQVGETFKVPSSCPIVTVDGYVYPS

SEQ ID NO: 1672 - protein, 40 aa, Artificial Sequence
  Description of Artificial Sequence: Synthetic polypeptide
APEYWCSIAYFEMDVQVGETFKVPSSCPIVTVDGYVYPSG

SEQ ID NO: 1673 - protein, 40 aa, Artificial Sequence
  Description of Artificial Sequence: Synthetic polypeptide
CSIAYFEMDVQVGETFKVPSSCPIVTVDGYVYPSGGDRFC

SEQ ID NO: 1674 - protein, 40 aa, Artificial Sequence
  Description of Artificial Sequence: Synthetic polypeptide
IAYFEMDVQVGETFKVPSSCPIVTVDGYVYPSGGDRFCLG

SEQ ID NO: 1675 - protein, 40 aa, Artificial Sequence
  Description of Artificial Sequence: Synthetic polypeptide
YFEMDVQVGETFKVPSSCPIVTVDGYVYPSGGDRFCLGQL

SEQ ID NO: 1676 - protein, 40 aa, Artificial Sequence
  Description of Artificial Sequence: Synthetic polypeptide
EMDVQVGETFKVPSSCPIVTVDGYVYPSGGDRFCLGQLSN

SEQ ID NO: 1677 - protein, 40 aa, Artificial Sequence
  Description of Artificial Sequence: Synthetic polypeptide
MDVQVGETFKVPSSCPIVTVDGYVYPSGGDRFCLGQLSNV

SEQ ID NO: 1678 - protein, 40 aa, Artificial Sequence
  Description of Artificial Sequence: Synthetic polypeptide
CPIVTVDGYVYPSGGDRFCLGQLSNVHRTEAIERARLHIG

SEQ ID NO: 1679 - protein, 40 aa, Artificial Sequence
  Description of Artificial Sequence: Synthetic polypeptide
HPAPEYWCSIAYFEMDVQVGETFKVPSSCPIVTVDGYVDL

SEQ ID NO: 1680 - protein, 40 aa, Artificial Sequence
  Description of Artificial Sequence: Synthetic polypeptide
PAPEYWCSIAYFEMDVQVGETFKVPSSCPIVTVDGYVDLS

SEQ ID NO: 1681 - protein, 40 aa, Artificial Sequence
  Description of Artificial Sequence: Synthetic polypeptide
IAYFEMDVQVGETFKVPSSCPIVTVDGYVDLSGGDRFCLG

SEQ ID NO: 1682 - protein, 40 aa, Artificial Sequence
  Description of Artificial Sequence: Synthetic polypeptide
VQVGETFKVPSSCPIVTVDGYVDLSGGDRFCLGQLSNVHR

SEQ ID NO: 1683 - protein, 40 aa, Artificial Sequence
  Description of Artificial Sequence: Synthetic polypeptide
HPAPEYWCSIAYFEMDVQVGETFKVPSSCPIVTVDGYVDS

SEQ ID NO: 1684 - protein, 40 aa, Artificial Sequence
  Description of Artificial Sequence: Synthetic polypeptide
APEYWCSIAYFEMDVQVGETFKVPSSCPIVTVDGYVDSSG

SEQ ID NO: 1685 - protein, 40 aa, Artificial Sequence
  Description of Artificial Sequence: Synthetic polypeptide
PEYWCSIAYFEMDVQVGETFKVPSSCPIVTVDGYVDSSGG

SEQ ID NO: 1686 - protein, 40 aa, Artificial Sequence
  Description of Artificial Sequence: Synthetic polypeptide
SIAYFEMDVQVGETFKVPSSCPIVTVDGYVDSSGGDRFCL

SEQ ID NO: 1687 - protein, 40 aa, Artificial Sequence
  Description of Artificial Sequence: Synthetic polypeptide
AYFEMDVQVGETFKVPSSCPIVTVDGYVDSSGGDRFCLGQ

SEQ ID NO: 1688 - protein, 40 aa, Artificial Sequence
  Description of Artificial Sequence: Synthetic polypeptide
FEMDVQVGETFKVPSSCPIVTVDGYVDSSGGDRFCLGQLS

SEQ ID NO: 1689 - protein, 40 aa, Artificial Sequence
  Description of Artificial Sequence: Synthetic polypeptide
MDVQVGETFKVPSSCPIVTVDGYVDSSGGDRFCLGQLSNV

SEQ ID NO: 1690 - protein, 40 aa, Artificial Sequence
  Description of Artificial Sequence: Synthetic polypeptide
SCPIVTVDGYVDSSGGDRFCLGQLSNVHRTEAIERARLHI

SEQ ID NO: 1691 - protein, 40 aa, Artificial Sequence
  Description of Artificial Sequence: Synthetic polypeptide
YVDSSGGDRFCLGQLSNVHRTEAIERARLHIGKGVQLECK

SEQ ID NO: 1692 - protein, 40 aa, Artificial Sequence
  Description of Artificial Sequence: Synthetic polypeptide
CSIAYFEMDVQVGETFKVPSSCPIVTVDGYVDPSGGDCFC

SEQ ID NO: 1693 - protein, 40 aa, Artificial Sequence
  Description of Artificial Sequence: Synthetic polypeptide
FEMDVQVGETFKVPSSCPIVTVDGYVDPSGGDCFCLGQLS

SEQ ID NO: 1694 - protein, 40 aa, Artificial Sequence
  Description of Artificial Sequence: Synthetic polypeptide
MDVQVGETFKVPSSCPIVTVDGYVDPSGGDCFCLGQLSNV

SEQ ID NO: 1695 - protein, 40 aa, Artificial Sequence
  Description of Artificial Sequence: Synthetic polypeptide
DVQVGETFKVPSSCPIVTVDGYVDPSGGDCFCLGQLSNVH

SEQ ID NO: 1696 - protein, 40 aa, Artificial Sequence
  Description of Artificial Sequence: Synthetic polypeptide
QVGETFKVPSSCPIVTVDGYVDPSGGDCFCLGQLSNVHRT

SEQ ID NO: 1697 - protein, 40 aa, Artificial Sequence
  Description of Artificial Sequence: Synthetic polypeptide
ETFKVPSSCPIVTVDGYVDPSGGDCFCLGQLSNVHRTEAI

SEQ ID NO: 1698 - protein, 40 aa, Artificial Sequence
  Description of Artificial Sequence: Synthetic polypeptide
VPSSCPIVTVDGYVDPSGGDCFCLGQLSNVHRTEAIERAR

SEQ ID NO: 1699 - protein, 40 aa, Artificial Sequence
  Description of Artificial Sequence: Synthetic polypeptide
SSCPIVTVDGYVDPSGGDCFCLGQLSNVHRTEAIERARLH

SEQ ID NO: 1700 - protein, 40 aa, Artificial Sequence
  Description of Artificial Sequence: Synthetic polypeptide
IVTVDGYVDPSGGDCFCLGQLSNVHRTEAIERARLHIGKG

SEQ ID NO: 1701 - protein, 40 aa, Artificial Sequence
  Description of Artificial Sequence: Synthetic polypeptide
VTVDGYVDPSGGDCFCLGQLSNVHRTEAIERARLHIGKGV

SEQ ID NO: 1702 - protein, 40 aa, Artificial Sequence
  Description of Artificial Sequence: Synthetic polypeptide
VDGYVDPSGGDCFCLGQLSNVHRTEAIERARLHIGKGVQL

SEQ ID NO: 1703 - protein, 40 aa, Artificial Sequence
  Description of Artificial Sequence: Synthetic polypeptide
WCSIAYFEMDVQVGETFKVPSSCPIVTVDGYVDPSGGDHF

SEQ ID NO: 1704 - protein, 40 aa, Artificial Sequence
  Description of Artificial Sequence: Synthetic polypeptide
IAYFEMDVQVGETFKVPSSCPIVTVDGYVDPSGGDHFCLG

SEQ ID NO: 1705 - protein, 40 aa, Artificial Sequence
  Description of Artificial Sequence: Synthetic polypeptide
DVQVGETFKVPSSCPIVTVDGYVDPSGGDHFCLGQLSNVH

SEQ ID NO: 1706 - protein, 40 aa, Artificial Sequence
  Description of Artificial Sequence: Synthetic polypeptide
VTVDGYVDPSGGDHFCLGQLSNVHRTEAIERARLHIGKGV

SEQ ID NO: 1707 - protein, 40 aa, Artificial Sequence
  Description of Artificial Sequence: Synthetic polypeptide
SIAYFEMDVQVGETFKVPSSCPIVTVDGYVDPSGGDRFSL

SEQ ID NO: 1708 - protein, 40 aa, Artificial Sequence
  Description of Artificial Sequence: Synthetic polypeptide
DVQVGETFKVPSSCPIVTVDGYVDPSGGDRFSLGQLSNVH

SEQ ID NO: 1709 - protein, 40 aa, Artificial Sequence
  Description of Artificial Sequence: Synthetic polypeptide
QVGETFKVPSSCPIVTVDGYVDPSGGDRFSLGQLSNVHRT

SEQ ID NO: 1710 - protein, 40 aa, Artificial Sequence
  Description of Artificial Sequence: Synthetic polypeptide
SGGDRFSLGQLSNVHRTEAIERARLHIGKGVQLECKGEGD

SEQ ID NO: 1711 - protein, 40 aa, Artificial Sequence
  Description of Artificial Sequence: Synthetic polypeptide
FSLGQLSNVHRTEAIERARLHIGKGVQLECKGEGDVWVRC

SEQ ID NO: 1712 - protein, 40 aa, Artificial Sequence
  Description of Artificial Sequence: Synthetic polypeptide
IAYFEMDVQVGETFKVPSSCPIVTVDGYVDPSGGDRFCLD

SEQ ID NO: 1713 - protein, 40 aa, Artificial Sequence
  Description of Artificial Sequence: Synthetic polypeptide
EMDVQVGETFKVPSSCPIVTVDGYVDPSGGDRFCLDQLSN

SEQ ID NO: 1714 - protein, 40 aa, Artificial Sequence
  Description of Artificial Sequence: Synthetic polypeptide
MDVQVGETFKVPSSCPIVTVDGYVDPSGGDRFCLDQLSNV

SEQ ID NO: 1715 - protein, 40 aa, Artificial Sequence
  Description of Artificial Sequence: Synthetic polypeptide
VQVGETFKVPSSCPIVTVDGYVDPSGGDRFCLDQLSNVHR

SEQ ID NO: 1716 - protein, 40 aa, Artificial Sequence
  Description of Artificial Sequence: Synthetic polypeptide
QVGETFKVPSSCPIVTVDGYVDPSGGDRFCLDQLSNVHRT

SEQ ID NO: 1717 - protein, 40 aa, Artificial Sequence
  Description of Artificial Sequence: Synthetic polypeptide
PSSCPIVTVDGYVDPSGGDRFCLDQLSNVHRTEAIERARL

SEQ ID NO: 1718 - protein, 40 aa, Artificial Sequence
  Description of Artificial Sequence: Synthetic polypeptide
VDGYVDPSGGDRFCLDQLSNVHRTEAIERARLHIGKGVQL

SEQ ID NO: 1719 - protein, 40 aa, Artificial Sequence
  Description of Artificial Sequence: Synthetic polypeptide
SGGDRFCLDQLSNVHRTEAIERARLHIGKGVQLECKGEGD

SEQ ID NO: 1720 - protein, 40 aa, Artificial Sequence
  Description of Artificial Sequence: Synthetic polypeptide
GDRFCLDQLSNVHRTEAIERARLHIGKGVQLECKGEGDVW

SEQ ID NO: 1721 - protein, 40 aa, Artificial Sequence
  Description of Artificial Sequence: Synthetic polypeptide
CLDQLSNVHRTEAIERARLHIGKGVQLECKGEGDVWVRCL

SEQ ID NO: 1722 - protein, 40 aa, Artificial Sequence
  Description of Artificial Sequence: Synthetic polypeptide
AYFEMDVQVGETFKVPSSCPIVTVDGYVDPSGGDRFCLRQ

SEQ ID NO: 1723 - protein, 40 aa, Artificial Sequence
  Description of Artificial Sequence: Synthetic polypeptide
SCPIVTVDGYVDPSGGDRFCLRQLSNVHRTEAIERARLHI

SEQ ID NO: 1724 - protein, 40 aa, Artificial Sequence
  Description of Artificial Sequence: Synthetic polypeptide
FEMDVQVGETFKVPSSCPIVTVDGYVDPSGGDRFCLGKLS

SEQ ID NO: 1725 - protein, 40 aa, Artificial Sequence
  Description of Artificial Sequence: Synthetic polypeptide
EMDVQVGETFKVPSSCPIVTVDGYVDPSGGDRFCLGKLSN

SEQ ID NO: 1726 - protein, 40 aa, Artificial Sequence
  Description of Artificial Sequence: Synthetic polypeptide
DVQVGETFKVPSSCPIVTVDGYVDPSGGDRFCLGKLSNVH

SEQ ID NO: 1727 - protein, 40 aa, Artificial Sequence
  Description of Artificial Sequence: Synthetic polypeptide
VGETFKVPSSCPIVTVDGYVDPSGGDRFCLGKLSNVHRTE

SEQ ID NO: 1728 - protein, 40 aa, Artificial Sequence
  Description of Artificial Sequence: Synthetic polypeptide
TFKVPSSCPIVTVDGYVDPSGGDRFCLGKLSNVHRTEAIE

SEQ ID NO: 1729 - protein, 40 aa, Artificial Sequence
  Description of Artificial Sequence: Synthetic polypeptide
PSSCPIVTVDGYVDPSGGDRFCLGKLSNVHRTEAIERARL

SEQ ID NO: 1730 - protein, 40 aa, Artificial Sequence
  Description of Artificial Sequence: Synthetic polypeptide
VTVDGYVDPSGGDRFCLGKLSNVHRTEAIERARLHIGKGV

SEQ ID NO: 1731 - protein, 40 aa, Artificial Sequence
  Description of Artificial Sequence: Synthetic polypeptide
DPSGGDRFCLGKLSNVHRTEAIERARLHIGKGVQLECKGE

SEQ ID NO: 1732 - protein, 40 aa, Artificial Sequence
  Description of Artificial Sequence: Synthetic polypeptide
CLGKLSNVHRTEAIERARLHIGKGVQLECKGEGDVWVRCL

SEQ ID NO: 1733 - protein, 40 aa, Artificial Sequence
  Description of Artificial Sequence: Synthetic polypeptide
DVQVGETFKVPSSCPIVTVDGYVDPSGGDRFCLGQLCNVH

SEQ ID NO: 1734 - protein, 40 aa, Artificial Sequence
  Description of Artificial Sequence: Synthetic polypeptide
TFKVPSSCPIVTVDGYVDPSGGDRFCLGQLCNVHRTEAIE

SEQ ID NO: 1735 - protein, 40 aa, Artificial Sequence
  Description of Artificial Sequence: Synthetic polypeptide
TVDGYVDPSGGDRFCLGQLCNVHRTEAIERARLHIGKGVQ

SEQ ID NO: 1736 - protein, 40 aa, Artificial Sequence
  Description of Artificial Sequence: Synthetic polypeptide
VDGYVDPSGGDRFCLGQLCNVHRTEAIERARLHIGKGVQL

SEQ ID NO: 1737 - protein, 40 aa, Artificial Sequence
  Description of Artificial Sequence: Synthetic polypeptide
GYVDPSGGDRFCLGQLCNVHRTEAIERARLHIGKGVQLEC

SEQ ID NO: 1738 - protein, 40 aa, Artificial Sequence
  Description of Artificial Sequence: Synthetic polypeptide
YVDPSGGDRFCLGQLCNVHRTEAIERARLHIGKGVQLECK

SEQ ID NO: 1739 - protein, 40 aa, Artificial Sequence
  Description of Artificial Sequence: Synthetic polypeptide
RFCLGQLCNVHRTEAIERARLHIGKGVQLECKGEGDVWVR

SEQ ID NO: 1740 - protein, 40 aa, Artificial Sequence
  Description of Artificial Sequence: Synthetic polypeptide
DGYVDPSGGDRFCLGQLSNVHRTEAIERARLDIGKGVQLE

SEQ ID NO: 1741 - protein, 40 aa, Artificial Sequence
  Description of Artificial Sequence: Synthetic polypeptide
GYVDPSGGDRFCLGQLSNVHRTEAIERARLDIGKGVQLEC

SEQ ID NO: 1742 - protein, 40 aa, Artificial Sequence
  Description of Artificial Sequence: Synthetic polypeptide
YVDPSGGDRFCLGQLSNVHRTEAIERARLDIGKGVQLECK

SEQ ID NO: 1743 - protein, 40 aa, Artificial Sequence
  Description of Artificial Sequence: Synthetic polypeptide
DPSGGDRFCLGQLSNVHRTEAIERARLDIGKGVQLECKGE

SEQ ID NO: 1744 - protein, 40 aa, Artificial Sequence
  Description of Artificial Sequence: Synthetic polypeptide
CLGQLSNVHRTEAIERARLDIGKGVQLECKGEGDVWVRCL

SEQ ID NO: 1745 - protein, 40 aa, Artificial Sequence
  Description of Artificial Sequence: Synthetic polypeptide
AIERARLDIGKGVQLECKGEGDVWVRCLSDHAVFVQSYYL

SEQ ID NO: 1746 - protein, 40 aa, Artificial Sequence
  Description of Artificial Sequence: Synthetic polypeptide
RLDIGKGVQLECKGEGDVWVRCLSDHAVFVQSYYLDREAG

SEQ ID NO: 1747 - protein, 40 aa, Artificial Sequence
  Description of Artificial Sequence: Synthetic polypeptide
IVTVDGYVDPSGGDRFCLGQLSNVHRTEAIERARLHRGKG

SEQ ID NO: 1748 - protein, 40 aa, Artificial Sequence
  Description of Artificial Sequence: Synthetic polypeptide
DRFCLGQLSNVHRTEAIERARLHRGKGVQLECKGEGDVWV

SEQ ID NO: 1749 - protein, 40 aa, Artificial Sequence
  Description of Artificial Sequence: Synthetic polypeptide
SNVHRTEAIERARLHRGKGVQLECKGEGDVWVRCLSDHAV

SEQ ID NO: 1750 - protein, 40 aa, Artificial Sequence
  Description of Artificial Sequence: Synthetic polypeptide
HRTEAIERARLHRGKGVQLECKGEGDVWVRCLSDHAVFVQ

SEQ ID NO: 1751 - protein, 40 aa, Artificial Sequence
  Description of Artificial Sequence: Synthetic polypeptide
ERARLHRGKGVQLECKGEGDVWVRCLSDHAVFVQSYYLDR

SEQ ID NO: 1752 - protein, 40 aa, Artificial Sequence
  Description of Artificial Sequence: Synthetic polypeptide
LHRGKGVQLECKGEGDVWVRCLSDHAVFVQSYYLDREAGR

SEQ ID NO: 1753 - protein, 40 aa, Artificial Sequence
  Description of Artificial Sequence: Synthetic polypeptide
TVDGYVDPSGGDRFCLGQLSNVHRTEAIERARLHIDKGVQ

SEQ ID NO: 1754 - protein, 40 aa, Artificial Sequence
  Description of Artificial Sequence: Synthetic polypeptide
LSNVHRTEAIERARLHIDKGVQLECKGEGDVWVRCLSDHA

SEQ ID NO: 1755 - protein, 40 aa, Artificial Sequence
  Description of Artificial Sequence: Synthetic polypeptide
TEAIERARLHIDKGVQLECKGEGDVWVRCLSDHAVFVQSY

SEQ ID NO: 1756 - protein, 40 aa, Artificial Sequence
  Description of Artificial Sequence: Synthetic polypeptide
ERARLHIDKGVQLECKGEGDVWVRCLSDHAVFVQSYYLDR

SEQ ID NO: 1757 - protein, 40 aa, Artificial Sequence
  Description of Artificial Sequence: Synthetic polypeptide
RLHIDKGVQLECKGEGDVWVRCLSDHAVFVQSYYLDREAG

SEQ ID NO: 1758 - protein, 40 aa, Artificial Sequence
  Description of Artificial Sequence: Synthetic polypeptide
IDKGVQLECKGEGDVWVRCLSDHAVFVQSYYLDREAGRAP

SEQ ID NO: 1759 - protein, 40 aa, Artificial Sequence
  Description of Artificial Sequence: Synthetic polypeptide
DKGVQLECKGEGDVWVRCLSDHAVFVQSYYLDREAGRAPG

SEQ ID NO: 1760 - protein, 40 aa, Artificial Sequence
  Description of Artificial Sequence: Synthetic polypeptide
YVDPSGGDRFCLGQLSNVHRTEAIERARLHIGKSVQLECK

SEQ ID NO: 1761 - protein, 40 aa, Artificial Sequence
  Description of Artificial Sequence: Synthetic polypeptide
GGDRFCLGQLSNVHRTEAIERARLHIGKSVQLECKGEGDV

SEQ ID NO: 1762 - protein, 40 aa, Artificial Sequence
  Description of Artificial Sequence: Synthetic polypeptide
RFCLGQLSNVHRTEAIERARLHIGKSVQLECKGEGDVWVR

SEQ ID NO: 1763 - protein, 40 aa, Artificial Sequence
  Description of Artificial Sequence: Synthetic polypeptide
QLSNVHRTEAIERARLHIGKSVQLECKGEGDVWVRCLSDH

SEQ ID NO: 1764 - protein, 40 aa, Artificial Sequence
  Description of Artificial Sequence: Synthetic polypeptide
TEAIERARLHIGKSVQLECKGEGDVWVRCLSDHAVFVQSY

SEQ ID NO: 1765 - protein, 40 aa, Artificial Sequence
  Description of Artificial Sequence: Synthetic polypeptide
HIGKSVQLECKGEGDVWVRCLSDHAVFVQSYYLDREAGRA

SEQ ID NO: 1766 - protein, 40 aa, Artificial Sequence
  Description of Artificial Sequence: Synthetic polypeptide
VDGYVDPSGGDRFCLGQLSNVHRTEAIERARLHIGKVVQL

SEQ ID NO: 1767 - protein, 40 aa, Artificial Sequence
  Description of Artificial Sequence: Synthetic polypeptide
GYVDPSGGDRFCLGQLSNVHRTEAIERARLHIGKVVQLEC

SEQ ID NO: 1768 - protein, 40 aa, Artificial Sequence
  Description of Artificial Sequence: Synthetic polypeptide
LGQLSNVHRTEAIERARLHIGKVVQLECKGEGDVWVRCLS

SEQ ID NO: 1769 - protein, 40 aa, Artificial Sequence
  Description of Artificial Sequence: Synthetic polypeptide
GQLSNVHRTEAIERARLHIGKVVQLECKGEGDVWVRCLSD

SEQ ID NO: 1770 - protein, 40 aa, Artificial Sequence
  Description of Artificial Sequence: Synthetic polypeptide
NVHRTEAIERARLHIGKVVQLECKGEGDVWVRCLSDHAVF

SEQ ID NO: 1771 - protein, 40 aa, Artificial Sequence
  Description of Artificial Sequence: Synthetic polypeptide
ERARLHIGKVVQLECKGEGDVWVRCLSDHAVFVQSYYLDR

SEQ ID NO: 1772 - protein, 40 aa, Artificial Sequence
  Description of Artificial Sequence: Synthetic polypeptide
ARLHIGKVVQLECKGEGDVWVRCLSDHAVFVQSYYLDREA

SEQ ID NO: 1773 - protein, 40 aa, Artificial Sequence
  Description of Artificial Sequence: Synthetic polypeptide
IGKVVQLECKGEGDVWVRCLSDHAVFVQSYYLDREAGRAP

SEQ ID NO: 1774 - protein, 40 aa, Artificial Sequence
  Description of Artificial Sequence: Synthetic polypeptide
NVHRTEAIERARLHIGKGVQLECKGEGDVWVRCLSDHVVF

SEQ ID NO: 1775 - protein, 40 aa, Artificial Sequence
  Description of Artificial Sequence: Synthetic polypeptide
VHRTEAIERARLHIGKGVQLECKGEGDVWVRCLSDHVVFV

SEQ ID NO: 1776 - protein, 40 aa, Artificial Sequence
  Description of Artificial Sequence: Synthetic polypeptide
TEAIERARLHIGKGVQLECKGEGDVWVRCLSDHVVFVQSY

SEQ ID NO: 1777 - protein, 40 aa, Artificial Sequence
  Description of Artificial Sequence: Synthetic polypeptide
IERARLHIGKGVQLECKGEGDVWVRCLSDHVVFVQSYYLD

SEQ ID NO: 1778 - protein, 40 aa, Artificial Sequence
  Description of Artificial Sequence: Synthetic polypeptide
ERARLHIGKGVQLECKGEGDVWVRCLSDHVVFVQSYYLDR

SEQ ID NO: 1779 - protein, 40 aa, Artificial Sequence
  Description of Artificial Sequence: Synthetic polypeptide
LHIGKGVQLECKGEGDVWVRCLSDHVVFVQSYYLDREAGR

SEQ ID NO: 1780 - protein, 40 aa, Artificial Sequence
  Description of Artificial Sequence: Synthetic polypeptide
GDVWVRCLSDHVVFVQSYYLDREAGRAPGDAVHKIYPSAY

SEQ ID NO: 1781 - protein, 40 aa, Artificial Sequence
  Description of Artificial Sequence: Synthetic polypeptide
HVVFVQSYYLDREAGRAPGDAVHKIYPSAYIKVFDLRQCH

SEQ ID NO: 1782 - protein, 40 aa, Artificial Sequence
  Description of Artificial Sequence: Synthetic polypeptide
RARLHIGKGVQLECKGEGDVWVRCLSDHAVLVQSYYLDRE

SEQ ID NO: 1783 - protein, 40 aa, Artificial Sequence
  Description of Artificial Sequence: Synthetic polypeptide
LHIGKGVQLECKGEGDVWVRCLSDHAVLVQSYYLDREAGR

SEQ ID NO: 1784 - protein, 40 aa, Artificial Sequence
  Description of Artificial Sequence: Synthetic polypeptide
LSDHAVLVQSYYLDREAGRAPGDAVHKIYPSAYIKVFDLR

SEQ ID NO: 1785 - protein, 40 aa, Artificial Sequence
  Description of Artificial Sequence: Synthetic polypeptide
VAGNIPGPGSVGGIAPAISLSAAAGIGVDDLRRLCILRMR

SEQ ID NO: 1786 - protein, 40 aa, Artificial Sequence
  Description of Artificial Sequence: Synthetic polypeptide
GNIPGPGSVGGIAPAISLSAAAGIGVDDLRRLCILRMRFV

SEQ ID NO: 1787 - protein, 40 aa, Artificial Sequence
  Description of Artificial Sequence: Synthetic polypeptide
AAAGIGVDDLRRLCILRMRFVKGWGPDYPRQSIKETPCWI

SEQ ID NO: 1788 - protein, 40 aa, Artificial Sequence
  Description of Artificial Sequence: Synthetic polypeptide
IPGPGSVGGIAPAISLSAAAGIGVDDLRRLCILRMSFVNG

SEQ ID NO: 1789 - protein, 40 aa, Artificial Sequence
  Description of Artificial Sequence: Synthetic polypeptide
VGGIAPAISLSAAAGIGVDDLRRLCILRMSFVNGWGPDYP

SEQ ID NO: 1790 - protein, 40 aa, Artificial Sequence
  Description of Artificial Sequence: Synthetic polypeptide
GGIAPAISLSAAAGIGVDDLRRLCILRMSFVNGWGPDYPR

SEQ ID NO: 1791 - protein, 40 aa, Artificial Sequence
  Description of Artificial Sequence: Synthetic polypeptide
GIAPAISLSAAAGIGVDDLRRLCILRMSFVKGGGPDYPRQ

SEQ ID NO: 1792 - protein, 40 aa, Artificial Sequence
  Description of Artificial Sequence: Synthetic polypeptide
LSAAAGIGVDDLRRLCILRMSFVKGWGPDYPRQSIKETPW

SEQ ID NO: 1793 - protein, 40 aa, Artificial Sequence
  Description of Artificial Sequence: Synthetic polypeptide
IGVDDLRRLCILRMSFVKGWGPDYPRQSIKETPCLIEIHL

SEQ ID NO: 1794 - protein, 40 aa, Artificial Sequence
  Description of Artificial Sequence: Synthetic polypeptide
YPRQSIKETPCLIEIHLHRALQLLDEVLHTMPIADPQPLD

SEQ ID NO: 1795 - protein, 40 aa, Artificial Sequence
  Description of Artificial Sequence: Synthetic polypeptide
SAAAGIGVDDLRRLCILRMSFVKGWGPDYPRQSIKETPCR

SEQ ID NO: 1796 - protein, 40 aa, Artificial Sequence
  Description of Artificial Sequence: Synthetic polypeptide
GEETKAMESQRAYRFVQGKDGGFKKFIRRDFLLDEANGLL

SEQ ID NO: 1797 - protein, 40 aa, Artificial Sequence
  Description of Artificial Sequence: Synthetic polypeptide
YRFVQGKDGGFKKFIRRDFLLDEANGLLPDDKLTLFCEVS

SEQ ID NO: 1798 - protein, 40 aa, Artificial Sequence
  Description of Artificial Sequence: Synthetic polypeptide
RFVQGKDGGFKKFIRRDFLLDEANGLLPDDKLTLFCEVSV

SEQ ID NO: 1799 - protein, 40 aa, Artificial Sequence
  Description of Artificial Sequence: Synthetic polypeptide
QGKDGGFKKFIRRDFLLDEANGLLPDDKLTLFCEVSVVQD

SEQ ID NO: 1800 - protein, 40 aa, Artificial Sequence
  Description of Artificial Sequence: Synthetic polypeptide
KSSTFSSGANDKLKWCLRVNPKGLDEESKDYLSLNLLLVS

SEQ ID NO: 1801 - protein, 40 aa, Artificial Sequence
  Description of Artificial Sequence: Synthetic polypeptide
SSTFSSGANDKLKWCLRVNPKGLDEESKDYLSLNLLLVSC

SEQ ID NO: 1802 - protein, 40 aa, Artificial Sequence
  Description of Artificial Sequence: Synthetic polypeptide
SSGANDKLKWCLRVNPKGLDEESKDYLSLNLLLVSCPKSE

SEQ ID NO: 1803 - protein, 40 aa, Artificial Sequence
  Description of Artificial Sequence: Synthetic polypeptide
SGANDKLKWCLRVNPKGLDEESKDYLSLNLLLVSCPKSEV

SEQ ID NO: 1804 - protein, 40 aa, Artificial Sequence
  Description of Artificial Sequence: Synthetic polypeptide
EESKDYLSLNLLLVSCPKSEVRAKFKFSILNAKGEETKAM

SEQ ID NO: 1805 - protein, 40 aa, Artificial Sequence
  Description of Artificial Sequence: Synthetic polypeptide
DPEARLTAQCVAERFSELEHLDRLSGRSCHEEKIPEDGSL

SEQ ID NO: 1806 - protein, 40 aa, Artificial Sequence
  Description of Artificial Sequence: Synthetic polypeptide
PAPAAPTPAAPAPAPSWPLSSSVPSQKTYQCSYGFRLGFL

SEQ ID NO: 1807 - protein, 40 aa, Artificial Sequence
  Description of Artificial Sequence: Synthetic polypeptide
AAPTPAAPAPAPSWPLSSSVPSQKTYQCSYGFRLGFLHSG

SEQ ID NO: 1808 - protein, 40 aa, Artificial Sequence
  Description of Artificial Sequence: Synthetic polypeptide
PAPAPSWPLSSSVPSQKTYQCSYGFRLGFLHSGTAKSVTC

SEQ ID NO: 1809 - protein, 40 aa, Artificial Sequence
  Description of Artificial Sequence: Synthetic polypeptide
APAPSWPLSSSVPSQKTYQCSYGFRLGFLHSGTAKSVTCT

SEQ ID NO: 1810 - protein, 40 aa, Artificial Sequence
  Description of Artificial Sequence: Synthetic polypeptide
APSWPLSSSVPSQKTYQCSYGFRLGFLHSGTAKSVTCTYS

SEQ ID NO: 1811 - protein, 40 aa, Artificial Sequence
  Description of Artificial Sequence: Synthetic polypeptide
EAAPPVAPAPAAPTPAAPAPAPSWPLSSSVPSQKTYQVSY

SEQ ID NO: 1812 - protein, 40 aa, Artificial Sequence
  Description of Artificial Sequence: Synthetic polypeptide
VAPAPAAPTPAAPAPAPSWPLSSSVPSQKTYQVSYGFRLG

SEQ ID NO: 1813 - protein, 40 aa, Artificial Sequence
  Description of Artificial Sequence: Synthetic polypeptide
APAPAAPTPAAPAPAPSWPLSSSVPSQKTYQVSYGFRLGF

SEQ ID NO: 1814 - protein, 40 aa, Artificial Sequence
  Description of Artificial Sequence: Synthetic polypeptide
PAPAAPTPAAPAPAPSWPLSSSVPSQKTYQVSYGFRLGFL

SEQ ID NO: 1815 - protein, 40 aa, Artificial Sequence
  Description of Artificial Sequence: Synthetic polypeptide
APAAPTPAAPAPAPSWPLSSSVPSQKTYQVSYGFRLGFLH

SEQ ID NO: 1816 - protein, 40 aa, Artificial Sequence
  Description of Artificial Sequence: Synthetic polypeptide
PTPAAPAPAPSWPLSSSVPSQKTYQVSYGFRLGFLHSGTA

SEQ ID NO: 1817 - protein, 40 aa, Artificial Sequence
  Description of Artificial Sequence: Synthetic polypeptide
AAPPVAPAPAAPTPAAPAPAPSWPLSSSVPSQKTYQGSDG

SEQ ID NO: 1818 - protein, 40 aa, Artificial Sequence
  Description of Artificial Sequence: Synthetic polypeptide
PAAPTPAAPAPAPSWPLSSSVPSQKTYQGSDGFRLGFLHS

SEQ ID NO: 1819 - protein, 40 aa, Artificial Sequence
  Description of Artificial Sequence: Synthetic polypeptide
APAPAAPTPAAPAPAPSWPLSSSVPSQKTYQGSYGSRLGF

SEQ ID NO: 1820 - protein, 40 aa, Artificial Sequence
  Description of Artificial Sequence: Synthetic polypeptide
APPVAPAPAAPTPAAPAPAPSWPLSSSVPSQKTYQGSYGV

SEQ ID NO: 1821 - protein, 40 aa, Artificial Sequence
  Description of Artificial Sequence: Synthetic polypeptide
APAPAAPTPAAPAPAPSWPLSSSVPSQKTYQGSYGVRLGF

SEQ ID NO: 1822 - protein, 40 aa, Artificial Sequence
  Description of Artificial Sequence: Synthetic polypeptide
PSWPLSSSVPSQKTYQGSYGFPLGFLHSGTAKSVTCTYSP

SEQ ID NO: 1823 - protein, 40 aa, Artificial Sequence
  Description of Artificial Sequence: Synthetic polypeptide
PLSSSVPSQKTYQGSYGFPLGFLHSGTAKSVTCTYSPALN

SEQ ID NO: 1824 - protein, 40 aa, Artificial Sequence
  Description of Artificial Sequence: Synthetic polypeptide
VPSQKTYQGSYGFPLGFLHSGTAKSVTCTYSPALNKMFCQ

SEQ ID NO: 1825 - protein, 40 aa, Artificial Sequence
  Description of Artificial Sequence: Synthetic polypeptide
RLGVLHSGTAKSVTCTYSPALNKMFCQLAKTCPVQLWVDS

SEQ ID NO: 1826 - protein, 40 aa, Artificial Sequence
  Description of Artificial Sequence: Synthetic polypeptide
AAPAPAPSWPLSSSVPSQKTYQGSYGFRLGFLHSGTAESV

SEQ ID NO: 1827 - protein, 40 aa, Artificial Sequence
  Description of Artificial Sequence: Synthetic polypeptide
LHSGTAKSVTCPYSPALNKMFCQLAKTCPVQLWVDSTPPP

SEQ ID NO: 1828 - protein, 40 aa, Artificial Sequence
  Description of Artificial Sequence: Synthetic polypeptide
SQKTYQGSYGFRLGFLHSGTAKSVTCTDSPALNKMFCQLA

SEQ ID NO: 1829 - protein, 40 aa, Artificial Sequence
  Description of Artificial Sequence: Synthetic polypeptide
GFLHSGTAKSVTCTYPPALNKMFCQLAKTCPVQLWVDSTP

SEQ ID NO: 1830 - protein, 40 aa, Artificial Sequence
  Description of Artificial Sequence: Synthetic polypeptide
YQGSYGFRLGFLHSGTAKSVTCTYSPALNEMFCQLAKTCP

SEQ ID NO: 1831 - protein, 40 aa, Artificial Sequence
  Description of Artificial Sequence: Synthetic polypeptide
LNEMFCQLAKTCPVQLWVDSTPPPGTRVRAMAIYKQSQHM

SEQ ID NO: 1832 - protein, 40 aa, Artificial Sequence
  Description of Artificial Sequence: Synthetic polypeptide
QGSYGFRLGFLHSGTAKSVTCTYSPALNNMFCQLAKTCPV

SEQ ID NO: 1833 - protein, 40 aa, Artificial Sequence
  Description of Artificial Sequence: Synthetic polypeptide
GFRLGFLHSGTAKSVTCTYSPALNNMFCQLAKTCPVQLWV

SEQ ID NO: 1834 - protein, 40 aa, Artificial Sequence
  Description of Artificial Sequence: Synthetic polypeptide
LGFLHSGTAKSVTCTYSPALNNMFCQLAKTCPVQLWVDST

SEQ ID NO: 1835 - protein, 40 aa, Artificial Sequence
  Description of Artificial Sequence: Synthetic polypeptide
ALNNMFCQLAKTCPVQLWVDSTPPPGTRVRAMAIYKQSQH

SEQ ID NO: 1836 - protein, 40 aa, Artificial Sequence
  Description of Artificial Sequence: Synthetic polypeptide
RLGFLHSGTAKSVTCTYSPALNKMLCQLAKTCPVQLWVDS

SEQ ID NO: 1837 - protein, 40 aa, Artificial Sequence
  Description of Artificial Sequence: Synthetic polypeptide
SYGFRLGFLHSGTAKSVTCTYSPALNKMFCELAKTCPVQL

SEQ ID NO: 1838 - protein, 40 aa, Artificial Sequence
  Description of Artificial Sequence: Synthetic polypeptide
LHSGTAKSVTCTYSPALNKMFCELAKTCPVQLWVDSTPPP

SEQ ID NO: 1839 - protein, 40 aa, Artificial Sequence
  Description of Artificial Sequence: Synthetic polypeptide
KSVTCTYSPALNKMFCELAKTCPVQLWVDSTPPPGTRVRA

SEQ ID NO: 1840 - protein, 40 aa, Artificial Sequence
  Description of Artificial Sequence: Synthetic polypeptide
ALNKMFCELAKTCPVQLWVDSTPPPGTRVRAMAIYKQSQH

SEQ ID NO: 1841 - protein, 40 aa, Artificial Sequence
  Description of Artificial Sequence: Synthetic polypeptide
CELAKTCPVQLWVDSTPPPGTRVRAMAIYKQSQHMTEVVR

SEQ ID NO: 1842 - protein, 40 aa, Artificial Sequence
  Description of Artificial Sequence: Synthetic polypeptide
KMFCQQAKTCPVQLWVDSTPPPGTRVRAMAIYKQSQHMTE

SEQ ID NO: 1843 - protein, 40 aa, Artificial Sequence
  Description of Artificial Sequence: Synthetic polypeptide
CQLTKTCPVQLWVDSTPPPGTRVRAMAIYKQSQHMTEVVR

SEQ ID NO: 1844 - protein, 40 aa, Artificial Sequence
  Description of Artificial Sequence: Synthetic polypeptide
GFLHSGTAKSVTCTYSPALNKMFCQLVKTCPVQLWVDSTP

SEQ ID NO: 1845 - protein, 40 aa, Artificial Sequence
  Description of Artificial Sequence: Synthetic polypeptide
CQLVKTCPVQLWVDSTPPPGTRVRAMAIYKQSQHMTEVVR

SEQ ID NO: 1846 - protein, 40 aa, Artificial Sequence
  Description of Artificial Sequence: Synthetic polypeptide
MFCQLAKTYPVQLWVDSTPPPGTRVRAMAIYKQSQHMTEV

SEQ ID NO: 1847 - protein, 40 aa, Artificial Sequence
  Description of Artificial Sequence: Synthetic polypeptide
CQLAKTCLVQLWVDSTPPPGTRVRAMAIYKQSQHMTEVVR

SEQ ID NO: 1848 - protein, 40 aa, Artificial Sequence
  Description of Artificial Sequence: Synthetic polypeptide
LGFLHSGTAKSVTCTYSPALNKMFCQLAKTCPAQLWVDST

SEQ ID NO: 1849 - protein, 40 aa, Artificial Sequence
  Description of Artificial Sequence: Synthetic polypeptide
CQLAKTCPAQLWVDSTPPPGTRVRAMAIYKQSQHMTEVVR

SEQ ID NO: 1850 - protein, 40 aa, Artificial Sequence
  Description of Artificial Sequence: Synthetic polypeptide
CPVHLWVDSTPPPGTRVRAMAIYKQSQHMTEVVRRCPHHE

SEQ ID NO: 1851 - protein, 40 aa, Artificial Sequence
  Description of Artificial Sequence: Synthetic polypeptide
GTAKSVTCTYSPALNKMFCQLAKTCPVQPWVDSTPPPGTR

SEQ ID NO: 1852 - protein, 40 aa, Artificial Sequence
  Description of Artificial Sequence: Synthetic polypeptide
KMFCQLAKTCPVQPWVDSTPPPGTRVRAMAIYKQSQHMTE

SEQ ID NO: 1853 - protein, 40 aa, Artificial Sequence
  Description of Artificial Sequence: Synthetic polypeptide
MFCQLAKTCPVQPWVDSTPPPGTRVRAMAIYKQSQHMTEV

SEQ ID NO: 1854 - protein, 40 aa, Artificial Sequence
  Description of Artificial Sequence: Synthetic polypeptide
FRLGFLHSGTAKSVTCTYSPALNKMFCQLAKTCPVQLWGD

SEQ ID NO: 1855 - protein, 40 aa, Artificial Sequence
  Description of Artificial Sequence: Synthetic polypeptide
LWGDSTPPPGTRVRAMAIYKQSQHMTEVVRRCPHHERCSD

SEQ ID NO: 1856 - protein, 40 aa, Artificial Sequence
  Description of Artificial Sequence: Synthetic polypeptide
CQLAKTCPVQLWVDSTSPPGTRVRAMAIYKQSQHMTEVVR

SEQ ID NO: 1857 - protein, 40 aa, Artificial Sequence
  Description of Artificial Sequence: Synthetic polypeptide
CPVQLWVDSTSPPGTRVRAMAIYKQSQHMTEVVRRCPHHE

SEQ ID NO: 1858 - protein, 40 aa, Artificial Sequence
  Description of Artificial Sequence: Synthetic polypeptide
LWVDSTPLPGTRVRAMAIYKQSQHMTEVVRRCPHHERCSD

SEQ ID NO: 1859 - protein, 40 aa, Artificial Sequence
  Description of Artificial Sequence: Synthetic polypeptide
PSPGTRVRAMAIYKQSQHMTEVVRRCPHHERCSDSDGLAP

SEQ ID NO: 1860 - protein, 40 aa, Artificial Sequence
  Description of Artificial Sequence: Synthetic polypeptide
WVDSTPPPVTRVRAMAIYKQSQHMTEVVRRCPHHERCSDS

SEQ ID NO: 1861 - protein, 40 aa, Artificial Sequence
  Description of Artificial Sequence: Synthetic polypeptide
PPPVTRVRAMAIYKQSQHMTEVVRRCPHHERCSDSDGLAP

SEQ ID NO: 1862 - protein, 40 aa, Artificial Sequence
  Description of Artificial Sequence: Synthetic polypeptide
WVDSTPPPGPRVRAMAIYKQSQHMTEVVRRCPHHERCSDS

SEQ ID NO: 1863 - protein, 40 aa, Artificial Sequence
  Description of Artificial Sequence: Synthetic polypeptide
PGPRVRAMAIYKQSQHMTEVVRRCPHHERCSDSDGLAPPQ

SEQ ID NO: 1864 - protein, 40 aa, Artificial Sequence
  Description of Artificial Sequence: Synthetic polypeptide
PRVRAMAIYKQSQHMTEVVRRCPHHERCSDSDGLAPPQHL

SEQ ID NO: 1865 - protein, 40 aa, Artificial Sequence
  Description of Artificial Sequence: Synthetic polypeptide
PGTPVRAMAIYKQSQHMTEVVRRCPHHERCSDSDGLAPPQ

SEQ ID NO: 1866 - protein, 40 aa, Artificial Sequence
  Description of Artificial Sequence: Synthetic polypeptide
ALNKMFCQLAKTCPVQLWVDSTPPPGTRDRAMAIYKQSQH

SEQ ID NO: 1867 - protein, 40 aa, Artificial Sequence
  Description of Artificial Sequence: Synthetic polypeptide
DSTPPPGTRVHAMAIYKQSQHMTEVVRRCPHHERCSDSDG

SEQ ID NO: 1868 - protein, 40 aa, Artificial Sequence
  Description of Artificial Sequence: Synthetic polypeptide
QLWVDSTPPPGTRVSAMAIYKQSQHMTEVVRRCPHHERCS

SEQ ID NO: 1869 - protein, 40 aa, Artificial Sequence
  Description of Artificial Sequence: Synthetic polypeptide
DSTPPPGTRVSAMAIYKQSQHMTEVVRRCPHHERCSDSDG

SEQ ID NO: 1870 - protein, 40 aa, Artificial Sequence
  Description of Artificial Sequence: Synthetic polypeptide
SAMAIYKQSQHMTEVVRRCPHHERCSDSDGLAPPQHLIRV

SEQ ID NO: 1871 - protein, 40 aa, Artificial Sequence
  Description of Artificial Sequence: Synthetic polypeptide
CQLAKTCPVQLWVDSTPPPGTRVRPMAIYKQSQHMTEVVR

SEQ ID NO: 1872 - protein, 40 aa, Artificial Sequence
  Description of Artificial Sequence: Synthetic polypeptide
CPVQLWVDSTPPPGTRVRPMAIYKQSQHMTEVVRRCPHHE

SEQ ID NO: 1873 - protein, 40 aa, Artificial Sequence
  Description of Artificial Sequence: Synthetic polypeptide
VQLWVDSTPPPGTRVRAMDIYKQSQHMTEVVRRCPHHERC

SEQ ID NO: 1874 - protein, 40 aa, Artificial Sequence
  Description of Artificial Sequence: Synthetic polypeptide
GTRVRAMTIYKQSQHMTEVVRRCPHHERCSDSDGLAPPQH

SEQ ID NO: 1875 - protein, 40 aa, Artificial Sequence
  Description of Artificial Sequence: Synthetic polypeptide
KMFCQLAKTCPVQLWVDSTPPPGTRVRAMAFYKQSQHMTE

SEQ ID NO: 1876 - protein, 40 aa, Artificial Sequence
  Description of Artificial Sequence: Synthetic polypeptide
CQLAKTCPVQLWVDSTPPPGTRVRAMAFYKQSQHMTEVVR

SEQ ID NO: 1877 - protein, 40 aa, Artificial Sequence
  Description of Artificial Sequence: Synthetic polypeptide
RVRAMAFYKQSQHMTEVVRRCPHHERCSDSDGLAPPQHLI

SEQ ID NO: 1878 - protein, 40 aa, Artificial Sequence
  Description of Artificial Sequence: Synthetic polypeptide
STPPPGTRVRAMAICKQSQHMTEVVRRCPHHERCSDSDGL

SEQ ID NO: 1879 - protein, 40 aa, Artificial Sequence
  Description of Artificial Sequence: Synthetic polypeptide
GTRVRAMAIHKQSQHMTEVVRRCPHHERCSDSDGLAPPQH

SEQ ID NO: 1880 - protein, 40 aa, Artificial Sequence
  Description of Artificial Sequence: Synthetic polypeptide
VRAMAIHKQSQHMTEVVRRCPHHERCSDSDGLAPPQHLIR

SEQ ID NO: 1881 - protein, 40 aa, Artificial Sequence
  Description of Artificial Sequence: Synthetic polypeptide
AIHKQSQHMTEVVRRCPHHERCSDSDGLAPPQHLIRVEGN

SEQ ID NO: 1882 - protein, 40 aa, Artificial Sequence
  Description of Artificial Sequence: Synthetic polypeptide
NKMFCQLAKTCPVQLWVDSTPPPGTRVRAMAIYEQSQHMT

SEQ ID NO: 1883 - protein, 40 aa, Artificial Sequence
  Description of Artificial Sequence: Synthetic polypeptide
KMFCQLAKTCPVQLWVDSTPPPGTRVRAMAIYEQSQHMTE

SEQ ID NO: 1884 - protein, 40 aa, Artificial Sequence
  Description of Artificial Sequence: Synthetic polypeptide
WVDSTPPPGTRVRAMAIYEQSQHMTEVVRRCPHHERCSDS

SEQ ID NO: 1885 - protein, 40 aa, Artificial Sequence
  Description of Artificial Sequence: Synthetic polypeptide
GTRVRAMAIYEQSQHMTEVVRRCPHHERCSDSDGLAPPQH

SEQ ID NO: 1886 - protein, 40 aa, Artificial Sequence
  Description of Artificial Sequence: Synthetic polypeptide
STPPPGTRVRAMAIYKQSQHMTEDVRRCPHHERCSDSDGL

SEQ ID NO: 1887 - protein, 40 aa, Artificial Sequence
  Description of Artificial Sequence: Synthetic polypeptide
DSTPPPGTRVRAMAIYKQSQHMTEVGRRCPHHERCSDSDG

SEQ ID NO: 1888 - protein, 40 aa, Artificial Sequence
  Description of Artificial Sequence: Synthetic polypeptide
VRAMAIYKQSQHMTEVGRRCPHHERCSDSDGLAPPQHLIR

SEQ ID NO: 1889 - protein, 40 aa, Artificial Sequence
  Description of Artificial Sequence: Synthetic polypeptide
RAMAIYKQSQHMTEVGRRCPHHERCSDSDGLAPPQHLIRV

SEQ ID NO: 1890 - protein, 40 aa, Artificial Sequence
  Description of Artificial Sequence: Synthetic polypeptide
AMAIYKQSQHMTEVGRRCPHHERCSDSDGLAPPQHLIRVE

SEQ ID NO: 1891 - protein, 40 aa, Artificial Sequence
  Description of Artificial Sequence: Synthetic polypeptide
QHMTEVGRRCPHHERCSDSDGLAPPQHLIRVEGNLRVEYL

SEQ ID NO: 1892 - protein, 40 aa, Artificial Sequence
  Description of Artificial Sequence: Synthetic polypeptide
TEVGRRCPHHERCSDSDGLAPPQHLIRVEGNLRVEYLDDR

SEQ ID NO: 1893 - protein, 40 aa, Artificial Sequence
  Description of Artificial Sequence: Synthetic polypeptide
GTRVRAMAIYKQSQHMTEVLRRCPHHERCSDSDGLAPPQH

SEQ ID NO: 1894 - protein, 40 aa, Artificial Sequence
  Description of Artificial Sequence: Synthetic polypeptide
WRCPHHERCSDSDGLAPPQHLIRVEGNLRVEYLDDRNTFR

SEQ ID NO: 1895 - protein, 40 aa, Artificial Sequence
  Description of Artificial Sequence: Synthetic polypeptide
AKTCPVQLWVDSTPPPGTRVRAMAIYKQSQHMTEVVRGCP

SEQ ID NO: 1896 - protein, 40 aa, Artificial Sequence
  Description of Artificial Sequence: Synthetic polypeptide
PGTRVRAMAIYKQSQHMTEVVRGCPHHERCSDSDGLAPPQ

SEQ ID NO: 1897 - protein, 40 aa, Artificial Sequence
  Description of Artificial Sequence: Synthetic polypeptide
RGCPHHERCSDSDGLAPPQHLIRVEGNLRVEYLDDRNTFR

SEQ ID NO: 1898 - protein, 40 aa, Artificial Sequence
  Description of Artificial Sequence: Synthetic polypeptide
AIYKQSQHMTEVVRHCPHHERCSDSDGLAPPQHLIRVEGN

SEQ ID NO: 1899 - protein, 40 aa, Artificial Sequence
  Description of Artificial Sequence: Synthetic polypeptide
RAMAIYKQSQHMTEVVRRFPHHERCSDSDGLAPPQHLIRV

SEQ ID NO: 1900 - protein, 40 aa, Artificial Sequence
  Description of Artificial Sequence: Synthetic polypeptide
VVRRFPHHERCSDSDGLAPPQHLIRVEGNLRVEYLDDRNT

SEQ ID NO: 1901 - protein, 40 aa, Artificial Sequence
  Description of Artificial Sequence: Synthetic polypeptide
RFPHHERCSDSDGLAPPQHLIRVEGNLRVEYLDDRNTFRH

SEQ ID NO: 1902 - protein, 40 aa, Artificial Sequence
  Description of Artificial Sequence: Synthetic polypeptide
IYKQSQHMTEVVRRRPHHERCSDSDGLAPPQHLIRVEGNL

SEQ ID NO: 1903 - protein, 40 aa, Artificial Sequence
  Description of Artificial Sequence: Synthetic polypeptide
QHMTEVVRRRPHHERCSDSDGLAPPQHLIRVEGNLRVEYL

SEQ ID NO: 1904 - protein, 40 aa, Artificial Sequence
  Description of Artificial Sequence: Synthetic polypeptide
TEVVRRRPHHERCSDSDGLAPPQHLIRVEGNLRVEYLDDR

SEQ ID NO: 1905 - protein, 40 aa, Artificial Sequence
  Description of Artificial Sequence: Synthetic polypeptide
MTEVVRRCRHHERCSDSDGLAPPQHLIRVEGNLRVEYLDD

SEQ ID NO: 1906 - protein, 40 aa, Artificial Sequence
  Description of Artificial Sequence: Synthetic polypeptide
CPVQLWVDSTPPPGTRVRAMAIYKQSQHMTEVVRRCSHHE

SEQ ID NO: 1907 - protein, 40 aa, Artificial Sequence
  Description of Artificial Sequence: Synthetic polypeptide
VRRCSHHERCSDSDGLAPPQHLIRVEGNLRVEYLDDRNTF

SEQ ID NO: 1908 - protein, 40 aa, Artificial Sequence
  Description of Artificial Sequence: Synthetic polypeptide
RCSHHERCSDSDGLAPPQHLIRVEGNLRVEYLDDRNTFRH

SEQ ID NO: 1909 - protein, 40 aa, Artificial Sequence
  Description of Artificial Sequence: Synthetic polypeptide
RCPQHERCSDSDGLAPPQHLIRVEGNLRVEYLDDRNTFRH

SEQ ID NO: 1910 - protein, 40 aa, Artificial Sequence
  Description of Artificial Sequence: Synthetic polypeptide
STPPPGTRVRAMAIYKQSQHMTEVVRRCPHDERCSDSDGL

SEQ ID NO: 1911 - protein, 40 aa, Artificial Sequence
  Description of Artificial Sequence: Synthetic polypeptide
VRAMAIYKQSQHMTEVVRRCPHDERCSDSDGLAPPQHLIR

SEQ ID NO: 1912 - protein, 40 aa, Artificial Sequence
  Description of Artificial Sequence: Synthetic polypeptide
QHMTEVVRRCPHDERCSDSDGLAPPQHLIRVEGNLRVEYL

SEQ ID NO: 1913 - protein, 40 aa, Artificial Sequence
  Description of Artificial Sequence: Synthetic polypeptide
EVVRRCPHDERCSDSDGLAPPQHLIRVEGNLRVEYLDDRN

SEQ ID NO: 1914 - protein, 40 aa, Artificial Sequence
  Description of Artificial Sequence: Synthetic polypeptide
RCPHDERCSDSDGLAPPQHLIRVEGNLRVEYLDDRNTFRH

SEQ ID NO: 1915 - protein, 40 aa, Artificial Sequence
  Description of Artificial Sequence: Synthetic polypeptide
CPHDERCSDSDGLAPPQHLIRVEGNLRVEYLDDRNTFRHS

SEQ ID NO: 1916 - protein, 40 aa, Artificial Sequence
  Description of Artificial Sequence: Synthetic polypeptide
LWVDSTPPPGTRVRAMAIYKQSQHMTEVVRRCPHQERCSD

SEQ ID NO: 1917 - protein, 40 aa, Artificial Sequence
  Description of Artificial Sequence: Synthetic polypeptide
VDSTPPPGTRVRAMAIYKQSQHMTEVVRRCPHQERCSDSD

SEQ ID NO: 1918 - protein, 40 aa, Artificial Sequence
  Description of Artificial Sequence: Synthetic polypeptide
DSTPPPGTRVRAMAIYKQSQHMTEVVRRCPHQERCSDSDG

SEQ ID NO: 1919 - protein, 40 aa, Artificial Sequence
  Description of Artificial Sequence: Synthetic polypeptide
RVRAMAIYKQSQHMTEVVRRCPHQERCSDSDGLAPPQHLI

SEQ ID NO: 1920 - protein, 40 aa, Artificial Sequence
  Description of Artificial Sequence: Synthetic polypeptide
CPHRERCSDSDGLAPPQHLIRVEGNLRVEYLDDRNTFRHS

SEQ ID NO: 1921 - protein, 40 aa, Artificial Sequence
  Description of Artificial Sequence: Synthetic polypeptide
HRERCSDSDGLAPPQHLIRVEGNLRVEYLDDRNTFRHSVV

SEQ ID NO: 1922 - protein, 40 aa, Artificial Sequence
  Description of Artificial Sequence: Synthetic polypeptide
AIYKQSQHMTEVVRRCPHHKRCSDSDGLAPPQHLIRVEGN

SEQ ID NO: 1923 - protein, 40 aa, Artificial Sequence
  Description of Artificial Sequence: Synthetic polypeptide
SQHMTEVVRRCPHHKRCSDSDGLAPPQHLIRVEGNLRVEY

SEQ ID NO: 1924 - protein, 40 aa, Artificial Sequence
  Description of Artificial Sequence: Synthetic polypeptide
DSTPPPGTRVRAMAIYKQSQHMTEVVRRCPHHECCSDSDG

SEQ ID NO: 1925 - protein, 40 aa, Artificial Sequence
  Description of Artificial Sequence: Synthetic polypeptide
PPPGTRVRAMAIYKQSQHMTEVVRRCPHHECCSDSDGLAP

SEQ ID NO: 1926 - protein, 40 aa, Artificial Sequence
  Description of Artificial Sequence: Synthetic polypeptide
QHMTEVVRRCPHHECCSDSDGLAPPQHLIRVEGNLRVEYL

SEQ ID NO: 1927 - protein, 40 aa, Artificial Sequence
  Description of Artificial Sequence: Synthetic polypeptide
VDSTPPPGTRVRAMAIYKQSQHMTEVVRRCPHHEHCSDSD

SEQ ID NO: 1928 - protein, 40 aa, Artificial Sequence
  Description of Artificial Sequence: Synthetic polypeptide
AMAIYKQSQHMTEVVRRCPHHEHCSDSDGLAPPQHLIRVE

SEQ ID NO: 1929 - protein, 40 aa, Artificial Sequence
  Description of Artificial Sequence: Synthetic polypeptide
VRRCPHHEHCSDSDGLAPPQHLIRVEGNLRVEYLDDRNTF

SEQ ID NO: 1930 - protein, 40 aa, Artificial Sequence
  Description of Artificial Sequence: Synthetic polypeptide
RRCPHHEHCSDSDGLAPPQHLIRVEGNLRVEYLDDRNTFR

SEQ ID NO: 1931 - protein, 40 aa, Artificial Sequence
  Description of Artificial Sequence: Synthetic polypeptide
PHHEHCSDSDGLAPPQHLIRVEGNLRVEYLDDRNTFRHSV

SEQ ID NO: 1932 - protein, 40 aa, Artificial Sequence
  Description of Artificial Sequence: Synthetic polypeptide
VVRRCPHHERCSDSDGLALPQHLIRVEGNLRVEYLDDRNT

SEQ ID NO: 1933 - protein, 40 aa, Artificial Sequence
  Description of Artificial Sequence: Synthetic polypeptide
VRRCPHHERCSDSDGLALPQHLIRVEGNLRVEYLDDRNTF

SEQ ID NO: 1934 - protein, 40 aa, Artificial Sequence
  Description of Artificial Sequence: Synthetic polypeptide
HERCSDSDGLALPQHLIRVEGNLRVEYLDDRNTFRHSVVV

SEQ ID NO: 1935 - protein, 40 aa, Artificial Sequence
  Description of Artificial Sequence: Synthetic polypeptide
RCSDSDGLALPQHLIRVEGNLRVEYLDDRNTFRHSVVVPY

SEQ ID NO: 1936 - protein, 40 aa, Artificial Sequence
  Description of Artificial Sequence: Synthetic polypeptide
SQHMTEVVRRCPHHERCSDSDGLAPPRHLIRVEGNLRVEY

SEQ ID NO: 1937 - protein, 40 aa, Artificial Sequence
  Description of Artificial Sequence: Synthetic polypeptide
EVVRRCPHHERCSDSDGLAPPQNLIRVEGNLRVEYLDDRN

SEQ ID NO: 1938 - protein, 40 aa, Artificial Sequence
  Description of Artificial Sequence: Synthetic polypeptide
ERCSDSDGLAPPQNLIRVEGNLRVEYLDDRNTFRHSVVVP

SEQ ID NO: 1939 - protein, 40 aa, Artificial Sequence
  Description of Artificial Sequence: Synthetic polypeptide
SDSDGLAPPQNLIRVEGNLRVEYLDDRNTFRHSVVVPYEP

SEQ ID NO: 1940 - protein, 40 aa, Artificial Sequence
  Description of Artificial Sequence: Synthetic polypeptide
AMAIYKQSQHMTEVVRRCPHHERCSDSDGLAPPQRLIRVE

SEQ ID NO: 1941 - protein, 40 aa, Artificial Sequence
  Description of Artificial Sequence: Synthetic polypeptide
VVRRCPHHERCSDSDGLAPPQRLIRVEGNLRVEYLDDRNT

SEQ ID NO: 1942 - protein, 40 aa, Artificial Sequence
  Description of Artificial Sequence: Synthetic polypeptide
HMTEVVRRCPHHERCSDSDGLAPPQHFIRVEGNLRVEYLD

SEQ ID NO: 1943 - protein, 40 aa, Artificial Sequence
  Description of Artificial Sequence: Synthetic polypeptide
HERCSDSDGLAPPQHFIRVEGNLRVEYLDDRNTFRHSVVV

SEQ ID NO: 1944 - protein, 40 aa, Artificial Sequence
  Description of Artificial Sequence: Synthetic polypeptide
QHFIRVEGNLRVEYLDDRNTFRHSVVVPYEPPEVGSDCTT

SEQ ID NO: 1945 - protein, 40 aa, Artificial Sequence
  Description of Artificial Sequence: Synthetic polypeptide
AIYKQSQHMTEVVRRCPHHERCSDSDGLAPPQHHIRVEGN

SEQ ID NO: 1946 - protein, 40 aa, Artificial Sequence
  Description of Artificial Sequence: Synthetic polypeptide
HMTEVVRRCPHHERCSDSDGLAPPQHHIRVEGNLRVEYLD

SEQ ID NO: 1947 - protein, 40 aa, Artificial Sequence
  Description of Artificial Sequence: Synthetic polypeptide
CPHHERCSDSDGLAPPQHHIRVEGNLRVEYLDDRNTFRHS

SEQ ID NO: 1948 - protein, 40 aa, Artificial Sequence
  Description of Artificial Sequence: Synthetic polypeptide
ERCSDSDGLAPPQHHIRVEGNLRVEYLDDRNTFRHSVVVP

SEQ ID NO: 1949 - protein, 40 aa, Artificial Sequence
  Description of Artificial Sequence: Synthetic polypeptide
MTEVVRRCPHHERCSDSDGLAPPQHLFRVEGNLRVEYLDD

SEQ ID NO: 1950 - protein, 40 aa, Artificial Sequence
  Description of Artificial Sequence: Synthetic polypeptide
EVVRRCPHHERCSDSDGLAPPQHLFRVEGNLRVEYLDDRN

SEQ ID NO: 1951 - protein, 40 aa, Artificial Sequence
  Description of Artificial Sequence: Synthetic polypeptide
VRRCPHHERCSDSDGLAPPQHLFRVEGNLRVEYLDDRNTF

SEQ ID NO: 1952 - protein, 40 aa, Artificial Sequence
  Description of Artificial Sequence: Synthetic polypeptide
HHERCSDSDGLAPPQHLFRVEGNLRVEYLDDRNTFRHSVV

SEQ ID NO: 1953 - protein, 40 aa, Artificial Sequence
  Description of Artificial Sequence: Synthetic polypeptide
RCSDSDGLAPPQHLFRVEGNLRVEYLDDRNTFRHSVVVPY

SEQ ID NO: 1954 - protein, 40 aa, Artificial Sequence
  Description of Artificial Sequence: Synthetic polypeptide
CSDSDGLAPPQHLFRVEGNLRVEYLDDRNTFRHSVVVPYE

SEQ ID NO: 1955 - protein, 40 aa, Artificial Sequence
  Description of Artificial Sequence: Synthetic polypeptide
APPQHLFRVEGNLRVEYLDDRNTFRHSVVVPYEPPEVGSD

SEQ ID NO: 1956 - protein, 40 aa, Artificial Sequence
  Description of Artificial Sequence: Synthetic polypeptide
RVRAMAIYKQSQHMTEVVRRCPHHERCSDSDGLAPPQHLM

SEQ ID NO: 1957 - protein, 40 aa, Artificial Sequence
  Description of Artificial Sequence: Synthetic polypeptide
AMAIYKQSQHMTEVVRRCPHHERCSDSDGLAPPQHLMRVE

SEQ ID NO: 1958 - protein, 40 aa, Artificial Sequence
  Description of Artificial Sequence: Synthetic polypeptide
AIYKQSQHMTEVVRRCPHHERCSDSDGLAPPQHLMRVEGN

SEQ ID NO: 1959 - protein, 40 aa, Artificial Sequence
  Description of Artificial Sequence: Synthetic polypeptide
VRRCPHHERCSDSDGLAPPQHLMRVEGNLRVEYLDDRNTF

SEQ ID NO: 1960 - protein, 40 aa, Artificial Sequence
  Description of Artificial Sequence: Synthetic polypeptide
CSDSDGLAPPQHLMRVEGNLRVEYLDDRNTFRHSVVVPYE

SEQ ID NO: 1961 - protein, 40 aa, Artificial Sequence
  Description of Artificial Sequence: Synthetic polypeptide
RVRAMAIYKQSQHMTEVVRRCPHHERCSDSDGLAPPQHLN

SEQ ID NO: 1962 - protein, 40 aa, Artificial Sequence
  Description of Artificial Sequence: Synthetic polypeptide
VRAMAIYKQSQHMTEVVRRCPHHERCSDSDGLAPPQHLNR

SEQ ID NO: 1963 - protein, 40 aa, Artificial Sequence
  Description of Artificial Sequence: Synthetic polypeptide
YKQSQHMTEVVRRCPHHERCSDSDGLAPPQHLNRVEGNLR

SEQ ID NO: 1964 - protein, 40 aa, Artificial Sequence
  Description of Artificial Sequence: Synthetic polypeptide
QHMTEVVRRCPHHERCSDSDGLAPPQHLNRVEGNLRVEYL

SEQ ID NO: 1965 - protein, 40 aa, Artificial Sequence
  Description of Artificial Sequence: Synthetic polypeptide
RCSDSDGLAPPQHLNRVEGNLRVEYLDDRNTFRHSVVVPY

SEQ ID NO: 1966 - protein, 40 aa, Artificial Sequence
  Description of Artificial Sequence: Synthetic polypeptide
CSDSDGLAPPQHLNRVEGNLRVEYLDDRNTFRHSVVVPYE

SEQ ID NO: 1967 - protein, 40 aa, Artificial Sequence
  Description of Artificial Sequence: Synthetic polypeptide
RAMAIYKQSQHMTEVVRRCPHHERCSDSDGLAPPQHLIPV

SEQ ID NO: 1968 - protein, 40 aa, Artificial Sequence
  Description of Artificial Sequence: Synthetic polypeptide
SQHMTEVVRRCPHHERCSDSDGLAPPQHLIPVEGNLRVEY

SEQ ID NO: 1969 - protein, 40 aa, Artificial Sequence
  Description of Artificial Sequence: Synthetic polypeptide
RCPHHERCSDSDGLAPPQHLIPVEGNLRVEYLDDRNTFRH

SEQ ID NO: 1970 - protein, 40 aa, Artificial Sequence
  Description of Artificial Sequence: Synthetic polypeptide
CPHHERCSDSDGLAPPQHLIPVEGNLRVEYLDDRNTFRHS

SEQ ID NO: 1971 - protein, 40 aa, Artificial Sequence
  Description of Artificial Sequence: Synthetic polypeptide
PHHERCSDSDGLAPPQHLIPVEGNLRVEYLDDRNTFRHSV

SEQ ID NO: 1972 - protein, 40 aa, Artificial Sequence
  Description of Artificial Sequence: Synthetic polypeptide
HERCSDSDGLAPPQHLIPVEGNLRVEYLDDRNTFRHSVVV

SEQ ID NO: 1973 - protein, 40 aa, Artificial Sequence
  Description of Artificial Sequence: Synthetic polypeptide
LAPPQHLIPVEGNLRVEYLDDRNTFRHSVVVPYEPPEVGS

SEQ ID NO: 1974 - protein, 40 aa, Artificial Sequence
  Description of Artificial Sequence: Synthetic polypeptide
PVEGNLRVEYLDDRNTFRHSVVVPYEPPEVGSDCTTIHYN

SEQ ID NO: 1975 - protein, 40 aa, Artificial Sequence
  Description of Artificial Sequence: Synthetic polypeptide
TEVVRRCPHHERCSDSDGLAPPQHLIRGEGNLRVEYLDDR

SEQ ID NO: 1976 - protein, 40 aa, Artificial Sequence
  Description of Artificial Sequence: Synthetic polypeptide
EVVRRCPHHERCSDSDGLAPPQHLIRGEGNLRVEYLDDRN

SEQ ID NO: 1977 - protein, 40 aa, Artificial Sequence
  Description of Artificial Sequence: Synthetic polypeptide
HERCSDSDGLAPPQHLIRGEGNLRVEYLDDRNTFRHSVVV

SEQ ID NO: 1978 - protein, 40 aa, Artificial Sequence
  Description of Artificial Sequence: Synthetic polypeptide
LAPPQHLIRGEGNLRVEYLDDRNTFRHSVVVPYEPPEVGS

SEQ ID NO: 1979 - protein, 40 aa, Artificial Sequence
  Description of Artificial Sequence: Synthetic polypeptide
TEVVRRCPHHERCSDSDGLAPPQHLIRLEGNLRVEYLDDR

SEQ ID NO: 1980 - protein, 40 aa, Artificial Sequence
  Description of Artificial Sequence: Synthetic polypeptide
VVRRCPHHERCSDSDGLAPPQHLIRLEGNLRVEYLDDRNT

SEQ ID NO: 1981 - protein, 40 aa, Artificial Sequence
  Description of Artificial Sequence: Synthetic polypeptide
HERCSDSDGLAPPQHLIRVEGNLRVENLDDRNTFRHSVVV

SEQ ID NO: 1982 - protein, 40 aa, Artificial Sequence
  Description of Artificial Sequence: Synthetic polypeptide
PHHERCSDSDGLAPPQHLIRVEGNLRVESLDDRNTFRHSV

SEQ ID NO: 1983 - protein, 40 aa, Artificial Sequence
  Description of Artificial Sequence: Synthetic polypeptide
IRVEGNLRVESLDDRNTFRHSVVVPYEPPEVGSDCTTIHY

SEQ ID NO: 1984 - protein, 40 aa, Artificial Sequence
  Description of Artificial Sequence: Synthetic polypeptide
RVESLDDRNTFRHSVVVPYEPPEVGSDCTTIHYNYMCNSS

SEQ ID NO: 1985 - protein, 40 aa, Artificial Sequence
  Description of Artificial Sequence: Synthetic polypeptide
VRRCPHHERCSDSDGLAPPQHLIRVEGNLRVEYLDGRNTF

SEQ ID NO: 1986 - protein, 40 aa, Artificial Sequence
  Description of Artificial Sequence: Synthetic polypeptide
CPHHERCSDSDGLAPPQHLIRVEGNLRVEYLDGRNTFRHS

SEQ ID NO: 1987 - protein, 40 aa, Artificial Sequence
  Description of Artificial Sequence: Synthetic polypeptide
RVEYLDGRNTFRHSVVVPYEPPEVGSDCTTIHYNYMCNSS

SEQ ID NO: 1988 - protein, 40 aa, Artificial Sequence
  Description of Artificial Sequence: Synthetic polypeptide
PHHERCSDSDGLAPPQHLIRVEGNLRVEYLDDRNIFRHSV

SEQ ID NO: 1989 - protein, 40 aa, Artificial Sequence
  Description of Artificial Sequence: Synthetic polypeptide
RCSDSDGLAPPQHLIRVEGNLRVEYLDDRNIFRHSVVVPY

SEQ ID NO: 1990 - protein, 40 aa, Artificial Sequence
  Description of Artificial Sequence: Synthetic polypeptide
PQHLIRVEGNLRVEYLDDRNIFRHSVVVPYEPPEVGSDCT

SEQ ID NO: 1991 - protein, 40 aa, Artificial Sequence
  Description of Artificial Sequence: Synthetic polypeptide
IRVEGNLRVEYLDDRNIFRHSVVVPYEPPEVGSDCTTIHY

SEQ ID NO: 1992 - protein, 40 aa, Artificial Sequence
  Description of Artificial Sequence: Synthetic polypeptide
VEYLDDRNIFRHSVVVPYEPPEVGSDCTTIHYNYMCNSSC

SEQ ID NO: 1993 - protein, 40 aa, Artificial Sequence
  Description of Artificial Sequence: Synthetic polypeptide
DRNIFRHSVVVPYEPPEVGSDCTTIHYNYMCNSSCMGGMN

SEQ ID NO: 1994 - protein, 40 aa, Artificial Sequence
  Description of Artificial Sequence: Synthetic polypeptide
HHERCSDSDGLAPPQHLIRVEGNLRVEYLDDRNTFLHSVV

SEQ ID NO: 1995 - protein, 40 aa, Artificial Sequence
  Description of Artificial Sequence: Synthetic polypeptide
CSDSDGLAPPQHLIRVEGNLRVEYLDDRNTFLHSVVVPYE

SEQ ID NO: 1996 - protein, 40 aa, Artificial Sequence
  Description of Artificial Sequence: Synthetic polypeptide
HLIRVEGNLRVEYLDDRNTFLHSVVVPYEPPEVGSDCTTI

SEQ ID NO: 1997 - protein, 40 aa, Artificial Sequence
  Description of Artificial Sequence: Synthetic polypeptide
LIRVEGNLRVEYLDDRNTFLHSVVVPYEPPEVGSDCTTIH

SEQ ID NO: 1998 - protein, 40 aa, Artificial Sequence
  Description of Artificial Sequence: Synthetic polypeptide
LRVEYLDDRNTFLHSVVVPYEPPEVGSDCTTIHYNYMCNS

SEQ ID NO: 1999 - protein, 40 aa, Artificial Sequence
  Description of Artificial Sequence: Synthetic polypeptide
NTFLHSVVVPYEPPEVGSDCTTIHYNYMCNSSCMGGMNRR

SEQ ID NO: 2000 - protein, 40 aa, Artificial Sequence
  Description of Artificial Sequence: Synthetic polypeptide
IRVEGNLRVEYLDDRNTFRRSVVVPYEPPEVGSDCTTIHY

SEQ ID NO: 2001 - protein, 40 aa, Artificial Sequence
  Description of Artificial Sequence: Synthetic polypeptide
EGNLRVEYLDDRNTFRRSVVVPYEPPEVGSDCTTIHYNYM

SEQ ID NO: 2002 - protein, 40 aa, Artificial Sequence
  Description of Artificial Sequence: Synthetic polypeptide
RVEYLDDRNTFRRSVVVPYEPPEVGSDCTTIHYNYMCNSS

SEQ ID NO: 2003 - protein, 40 aa, Artificial Sequence
  Description of Artificial Sequence: Synthetic polypeptide
HERCSDSDGLAPPQHLIRVEGNLRVEYLDDRNTFRHGVVV

SEQ ID NO: 2004 - protein, 40 aa, Artificial Sequence
  Description of Artificial Sequence: Synthetic polypeptide
GLAPPQHLIRVEGNLRVEYLDDRNTFRHGVVVPYEPPEVG

SEQ ID NO: 2005 - protein, 40 aa, Artificial Sequence
  Description of Artificial Sequence: Synthetic polypeptide
APPQHLIRVEGNLRVEYLDDRNTFRHGVVVPYEPPEVGSD

SEQ ID NO: 2006 - protein, 40 aa, Artificial Sequence
  Description of Artificial Sequence: Synthetic polypeptide
IRVEGNLRVEYLDDRNTFRHGVVVPYEPPEVGSDCTTIHY

SEQ ID NO: 2007 - protein, 40 aa, Artificial Sequence
  Description of Artificial Sequence: Synthetic polypeptide
RHGVVVPYEPPEVGSDCTTIHYNYMCNSSCMGGMNRRPIL

SEQ ID NO: 2008 - protein, 40 aa, Artificial Sequence
  Description of Artificial Sequence: Synthetic polypeptide
LIRVEGNLRVEYLDDRNTFRHIVVVPYEPPEVGSDCTTIH

SEQ ID NO: 2009 - protein, 40 aa, Artificial Sequence
  Description of Artificial Sequence: Synthetic polypeptide
YLDDRNTFRHIVVVPYEPPEVGSDCTTIHYNYMCNSSCMG

SEQ ID NO: 2010 - protein, 40 aa, Artificial Sequence
  Description of Artificial Sequence: Synthetic polypeptide
CPHHERCSDSDGLAPPQHLIRVEGNLRVEYLDDRNTFRHR

SEQ ID NO: 2011 - protein, 40 aa, Artificial Sequence
  Description of Artificial Sequence: Synthetic polypeptide
LAPPQHLIRVEGNLRVEYLDDRNTFRHRVVVPYEPPEVGS

SEQ ID NO: 2012 - protein, 40 aa, Artificial Sequence
  Description of Artificial Sequence: Synthetic polypeptide
PPQHLIRVEGNLRVEYLDDRNTFRHRVVVPYEPPEVGSDC

SEQ ID NO: 2013 - protein, 40 aa, Artificial Sequence
  Description of Artificial Sequence: Synthetic polypeptide
HERCSDSDGLAPPQHLIRVEGNLRVEYLDDRNTFRHSEVV

SEQ ID NO: 2014 - protein, 40 aa, Artificial Sequence
  Description of Artificial Sequence: Synthetic polypeptide
RCSDSDGLAPPQHLIRVEGNLRVEYLDDRNTFRHSEVVPY

SEQ ID NO: 2015 - protein, 40 aa, Artificial Sequence
  Description of Artificial Sequence: Synthetic polypeptide
IRVEGNLRVEYLDDRNTFRHSEVVPYEPPEVGSDCTTIHY

SEQ ID NO: 2016 - protein, 40 aa, Artificial Sequence
  Description of Artificial Sequence: Synthetic polypeptide
RVEYLDDRNTFRHSEVVPYEPPEVGSDCTTIHYNYMCNSS

SEQ ID NO: 2017 - protein, 40 aa, Artificial Sequence
  Description of Artificial Sequence: Synthetic polypeptide
TFRHSEVVPYEPPEVGSDCTTIHYNYMCNSSCMGGMNRRP

SEQ ID NO: 2018 - protein, 40 aa, Artificial Sequence
  Description of Artificial Sequence: Synthetic polypeptide
SEVVPYEPPEVGSDCTTIHYNYMCNSSCMGGMNRRPILTI

SEQ ID NO: 2019 - protein, 40 aa, Artificial Sequence
  Description of Artificial Sequence: Synthetic polypeptide
EGNLRVEYLDDRNTFRHSLVVPYEPPEVGSDCTTIHYNYM

SEQ ID NO: 2020 - protein, 40 aa, Artificial Sequence
  Description of Artificial Sequence: Synthetic polypeptide
EYLDDRNTFRHSLVVPYEPPEVGSDCTTIHYNYMCNSSCM

SEQ ID NO: 2021 - protein, 40 aa, Artificial Sequence
  Description of Artificial Sequence: Synthetic polypeptide
RNTFRHSLVVPYEPPEVGSDCTTIHYNYMCNSSCMGGMNR

SEQ ID NO: 2022 - protein, 40 aa, Artificial Sequence
  Description of Artificial Sequence: Synthetic polypeptide
NTFRHSLVVPYEPPEVGSDCTTIHYNYMCNSSCMGGMNRR

SEQ ID NO: 2023 - protein, 40 aa, Artificial Sequence
  Description of Artificial Sequence: Synthetic polypeptide
GNLRVEYLDDRNTFRHSVVEPYEPPEVGSDCTTIHYNYMC

SEQ ID NO: 2024 - protein, 40 aa, Artificial Sequence
  Description of Artificial Sequence: Synthetic polypeptide
SDSDGLAPPQHLIRVEGNLRVEYLDDRNTFRHSVVVPCEP

SEQ ID NO: 2025 - protein, 40 aa, Artificial Sequence
  Description of Artificial Sequence: Synthetic polypeptide
PQHLIRVEGNLRVEYLDDRNTFRHSVVVPCEPPEVGSDCT

SEQ ID NO: 2026 - protein, 40 aa, Artificial Sequence
  Description of Artificial Sequence: Synthetic polypeptide
NLRVEYLDDRNTFRHSVVVPCEPPEVGSDCTTIHYNYMCN

SEQ ID NO: 2027 - protein, 40 aa, Artificial Sequence
  Description of Artificial Sequence: Synthetic polypeptide
NTFRHSVVVPCEPPEVGSDCTTIHYNYMCNSSCMGGMNRR

SEQ ID NO: 2028 - protein, 40 aa, Artificial Sequence
  Description of Artificial Sequence: Synthetic polypeptide
CSDSDGLAPPQHLIRVEGNLRVEYLDDRNTFRHSVVVPHE

SEQ ID NO: 2029 - protein, 40 aa, Artificial Sequence
  Description of Artificial Sequence: Synthetic polypeptide
VPHEPPEVGSDCTTIHYNYMCNSSCMGGMNRRPILTIITL

SEQ ID NO: 2030 - protein, 40 aa, Artificial Sequence
  Description of Artificial Sequence: Synthetic polypeptide
EYLDDRNTFRHSVVVPYEPPEVGSDCPTIHYNYMCNSSCM

SEQ ID NO: 2031 - protein, 40 aa, Artificial Sequence
  Description of Artificial Sequence: Synthetic polypeptide
DRNTFRHSVVVPYEPPEVGSDCPTIHYNYMCNSSCMGGMN

SEQ ID NO: 2032 - protein, 40 aa, Artificial Sequence
  Description of Artificial Sequence: Synthetic polypeptide
FRHSVVVPYEPPEVGSDCPTIHYNYMCNSSCMGGMNRRPI

SEQ ID NO: 2033 - protein, 40 aa, Artificial Sequence
  Description of Artificial Sequence: Synthetic polypeptide
FRHSVVVPYEPPEVGSDCTTSHYNYMCNSSCMGGMNRRPI

SEQ ID NO: 2034 - protein, 40 aa, Artificial Sequence
  Description of Artificial Sequence: Synthetic polypeptide
NTFRHSVVVPYEPPEVGSDCTTIHCNYMCNSSCMGGMNRR

SEQ ID NO: 2035 - protein, 40 aa, Artificial Sequence
  Description of Artificial Sequence: Synthetic polypeptide
CNYMCNSSCMGGMNRRPILTIITLEDSSGNLLGRNSFEVR

SEQ ID NO: 2036 - protein, 40 aa, Artificial Sequence
  Description of Artificial Sequence: Synthetic polypeptide
RVEGNLRVEYLDDRNTFRHSVVVPYEPPEVGSDCTTIHHN

SEQ ID NO: 2037 - protein, 40 aa, Artificial Sequence
  Description of Artificial Sequence: Synthetic polypeptide
VGSDCTTIHHNYMCNSSCMGGMNRRPILTIITLEDSSGNL

SEQ ID NO: 2038 - protein, 40 aa, Artificial Sequence
  Description of Artificial Sequence: Synthetic polypeptide
NLRVEYLDDRNTFRHSVVVPYEPPEVGSDCTTIHYNCMCN

SEQ ID NO: 2039 - protein, 40 aa, Artificial Sequence
  Description of Artificial Sequence: Synthetic polypeptide
LDDRNTFRHSVVVPYEPPEVGSDCTTIHYNCMCNSSCMGG

SEQ ID NO: 2040 - protein, 40 aa, Artificial Sequence
  Description of Artificial Sequence: Synthetic polypeptide
NTFRHSVVVPYEPPEVGSDCTTIHYNCMCNSSCMGGMNRR

SEQ ID NO: 2041 - protein, 40 aa, Artificial Sequence
  Description of Artificial Sequence: Synthetic polypeptide
VPYEPPEVGSDCTTIHYNCMCNSSCMGGMNRRPILTIITL

SEQ ID NO: 2042 - protein, 40 aa, Artificial Sequence
  Description of Artificial Sequence: Synthetic polypeptide
DCTTIHYNCMCNSSCMGGMNRRPILTIITLEDSSGNLLGR

SEQ ID NO: 2043 - protein, 40 aa, Artificial Sequence
  Description of Artificial Sequence: Synthetic polypeptide
YNCMCNSSCMGGMNRRPILTIITLEDSSGNLLGRNSFEVR

SEQ ID NO: 2044 - protein, 40 aa, Artificial Sequence
  Description of Artificial Sequence: Synthetic polypeptide
NCMCNSSCMGGMNRRPILTIITLEDSSGNLLGRNSFEVRV

SEQ ID NO: 2045 - protein, 40 aa, Artificial Sequence
  Description of Artificial Sequence: Synthetic polypeptide
SVVVPYEPPEVGSDCTTIHYNHMCNSSCMGGMNRRPILTI

SEQ ID NO: 2046 - protein, 40 aa, Artificial Sequence
  Description of Artificial Sequence: Synthetic polypeptide
VVVPYEPPEVGSDCTTIHYNHMCNSSCMGGMNRRPILTII

SEQ ID NO: 2047 - protein, 40 aa, Artificial Sequence
  Description of Artificial Sequence: Synthetic polypeptide
RVEYLDDRNTFRHSVVVPYEPPEVGSDCTTIHYNYICNSS

SEQ ID NO: 2048 - protein, 40 aa, Artificial Sequence
  Description of Artificial Sequence: Synthetic polypeptide
EPPEVGSDCTTIHYNYICNSSCMGGMNRRPILTIITLEDS

SEQ ID NO: 2049 - protein, 40 aa, Artificial Sequence
  Description of Artificial Sequence: Synthetic polypeptide
ICNSSCMGGMNRRPILTIITLEDSSGNLLGRNSFEVRVCA

SEQ ID NO: 2050 - protein, 40 aa, Artificial Sequence
  Description of Artificial Sequence: Synthetic polypeptide
VEYLDDRNTFRHSVVVPYEPPEVGSDCTTIHYNYKCNSSC

SEQ ID NO: 2051 - protein, 40 aa, Artificial Sequence
  Description of Artificial Sequence: Synthetic polypeptide
NTFRHSVVVPYEPPEVGSDCTTIHYNYKCNSSCMGGMNRR

SEQ ID NO: 2052 - protein, 40 aa, Artificial Sequence
  Description of Artificial Sequence: Synthetic polypeptide
YEPPEVGSDCTTIHYNYKCNSSCMGGMNRRPILTIITLED

SEQ ID NO: 2053 - protein, 40 aa, Artificial Sequence
  Description of Artificial Sequence: Synthetic polypeptide
EVGSDCTTIHYNYKCNSSCMGGMNRRPILTIITLEDSSGN

SEQ ID NO: 2054 - protein, 40 aa, Artificial Sequence
  Description of Artificial Sequence: Synthetic polypeptide
HYNYKCNSSCMGGMNRRPILTIITLEDSSGNLLGRNSFEV

SEQ ID NO: 2055 - protein, 40 aa, Artificial Sequence
  Description of Artificial Sequence: Synthetic polypeptide
YNYKCNSSCMGGMNRRPILTIITLEDSSGNLLGRNSFEVR

SEQ ID NO: 2056 - protein, 40 aa, Artificial Sequence
  Description of Artificial Sequence: Synthetic polypeptide
NYKCNSSCMGGMNRRPILTIITLEDSSGNLLGRNSFEVRV

SEQ ID NO: 2057 - protein, 40 aa, Artificial Sequence
  Description of Artificial Sequence: Synthetic polypeptide
KCNSSCMGGMNRRPILTIITLEDSSGNLLGRNSFEVRVCA

SEQ ID NO: 2058 - protein, 40 aa, Artificial Sequence
  Description of Artificial Sequence: Synthetic polypeptide
IHYNYVCNSSCMGGMNRRPILTIITLEDSSGNLLGRNSFE

SEQ ID NO: 2059 - protein, 40 aa, Artificial Sequence
  Description of Artificial Sequence: Synthetic polypeptide
YNYVCNSSCMGGMNRRPILTIITLEDSSGNLLGRNSFEVR

SEQ ID NO: 2060 - protein, 40 aa, Artificial Sequence
  Description of Artificial Sequence: Synthetic polypeptide
GNLRVEYLDDRNTFRHSVVVPYEPPEVGSDCTTIHYNYMR

SEQ ID NO: 2061 - protein, 40 aa, Artificial Sequence
  Description of Artificial Sequence: Synthetic polypeptide
DCTTIHYNYMRNSSCMGGMNRRPILTIITLEDSSGNLLGR

SEQ ID NO: 2062 - protein, 40 aa, Artificial Sequence
  Description of Artificial Sequence: Synthetic polypeptide
YNYMRNSSCMGGMNRRPILTIITLEDSSGNLLGRNSFEVR

SEQ ID NO: 2063 - protein, 40 aa, Artificial Sequence
  Description of Artificial Sequence: Synthetic polypeptide
MRNSSCMGGMNRRPILTIITLEDSSGNLLGRNSFEVRVCA

SEQ ID NO: 2064 - protein, 40 aa, Artificial Sequence
  Description of Artificial Sequence: Synthetic polypeptide
EYLDDRNTFRHSVVVPYEPPEVGSDCTTIHYNYMWNSSCM

SEQ ID NO: 2065 - protein, 40 aa, Artificial Sequence
  Description of Artificial Sequence: Synthetic polypeptide
HSVVVPYEPPEVGSDCTTIHYNYMWNSSCMGGMNRRPILT

SEQ ID NO: 2066 - protein, 40 aa, Artificial Sequence
  Description of Artificial Sequence: Synthetic polypeptide
TIHYNYMWNSSCMGGMNRRPILTIITLEDSSGNLLGRNSF

SEQ ID NO: 2067 - protein, 40 aa, Artificial Sequence
  Description of Artificial Sequence: Synthetic polypeptide
HYNYMWNSSCMGGMNRRPILTIITLEDSSGNLLGRNSFEV

SEQ ID NO: 2068 - protein, 40 aa, Artificial Sequence
  Description of Artificial Sequence: Synthetic polypeptide
YNYMWNSSCMGGMNRRPILTIITLEDSSGNLLGRNSFEVR

SEQ ID NO: 2069 - protein, 40 aa, Artificial Sequence
  Description of Artificial Sequence: Synthetic polypeptide
NYMWNSSCMGGMNRRPILTIITLEDSSGNLLGRNSFEVRV

SEQ ID NO: 2070 - protein, 40 aa, Artificial Sequence
  Description of Artificial Sequence: Synthetic polypeptide
YMWNSSCMGGMNRRPILTIITLEDSSGNLLGRNSFEVRVC

SEQ ID NO: 2071 - protein, 40 aa, Artificial Sequence
  Description of Artificial Sequence: Synthetic polypeptide
WNSSCMGGMNRRPILTIITLEDSSGNLLGRNSFEVRVCAC

SEQ ID NO: 2072 - protein, 40 aa, Artificial Sequence
  Description of Artificial Sequence: Synthetic polypeptide
RVEYLDDRNTFRHSVVVPYEPPEVGSDCTTIHYNYMYNSS

SEQ ID NO: 2073 - protein, 40 aa, Artificial Sequence
  Description of Artificial Sequence: Synthetic polypeptide
NYMYNSSCMGGMNRRPILTIITLEDSSGNLLGRNSFEVRV

SEQ ID NO: 2074 - protein, 40 aa, Artificial Sequence
  Description of Artificial Sequence: Synthetic polypeptide
YMYNSSCMGGMNRRPILTIITLEDSSGNLLGRNSFEVRVC

SEQ ID NO: 2075 - protein, 40 aa, Artificial Sequence
  Description of Artificial Sequence: Synthetic polypeptide
MYNSSCMGGMNRRPILTIITLEDSSGNLLGRNSFEVRVCA

SEQ ID NO: 2076 - protein, 40 aa, Artificial Sequence
  Description of Artificial Sequence: Synthetic polypeptide
PEVGSDCTTIHYNYMCDSSCMGGMNRRPILTIITLEDSSG

SEQ ID NO: 2077 - protein, 40 aa, Artificial Sequence
  Description of Artificial Sequence: Synthetic polypeptide
NYMCDSSCMGGMNRRPILTIITLEDSSGNLLGRNSFEVRV

SEQ ID NO: 2078 - protein, 40 aa, Artificial Sequence
  Description of Artificial Sequence: Synthetic polypeptide
MCDSSCMGGMNRRPILTIITLEDSSGNLLGRNSFEVRVCA

SEQ ID NO: 2079 - protein, 40 aa, Artificial Sequence
  Description of Artificial Sequence: Synthetic polypeptide
CDSSCMGGMNRRPILTIITLEDSSGNLLGRNSFEVRVCAC

SEQ ID NO: 2080 - protein, 40 aa, Artificial Sequence
  Description of Artificial Sequence: Synthetic polypeptide
YNYMCNRSCMGGMNRRPILTIITLEDSSGNLLGRNSFEVR

SEQ ID NO: 2081 - protein, 40 aa, Artificial Sequence
  Description of Artificial Sequence: Synthetic polypeptide
MCNRSCMGGMNRRPILTIITLEDSSGNLLGRNSFEVRVCA

SEQ ID NO: 2082 - protein, 40 aa, Artificial Sequence
  Description of Artificial Sequence: Synthetic polypeptide
NRSCMGGMNRRPILTIITLEDSSGNLLGRNSFEVRVCACP

SEQ ID NO: 2083 - protein, 40 aa, Artificial Sequence
  Description of Artificial Sequence: Synthetic polypeptide
EYLDDRNTFRHSVVVPYEPPEVGSDCTTIHYNYMCNSFCM

SEQ ID NO: 2084 - protein, 40 aa, Artificial Sequence
  Description of Artificial Sequence: Synthetic polypeptide
RHSVVVPYEPPEVGSDCTTIHYNYMCNSFCMGGMNRRPIL

SEQ ID NO: 2085 - protein, 40 aa, Artificial Sequence
  Description of Artificial Sequence: Synthetic polypeptide
HYNYMCNSFCMGGMNRRPILTIITLEDSSGNLLGRNSFEV

SEQ ID NO: 2086 - protein, 40 aa, Artificial Sequence
  Description of Artificial Sequence: Synthetic polypeptide
YMCNSFCMGGMNRRPILTIITLEDSSGNLLGRNSFEVRVC

SEQ ID NO: 2087 - protein, 40 aa, Artificial Sequence
  Description of Artificial Sequence: Synthetic polypeptide
MCNSFCMGGMNRRPILTIITLEDSSGNLLGRNSFEVRVCA

SEQ ID NO: 2088 - protein, 40 aa, Artificial Sequence
  Description of Artificial Sequence: Synthetic polypeptide
VEYLDDRNTFRHSVVVPYEPPEVGSDCTTIHYNYMCNSPC

SEQ ID NO: 2089 - protein, 40 aa, Artificial Sequence
  Description of Artificial Sequence: Synthetic polypeptide
RHSVVVPYEPPEVGSDCTTIHYNYMCNSPCMGGMNRRPIL

SEQ ID NO: 2090 - protein, 40 aa, Artificial Sequence
  Description of Artificial Sequence: Synthetic polypeptide
EVGSDCTTIHYNYMCNSPCMGGMNRRPILTIITLEDSSGN

SEQ ID NO: 2091 - protein, 40 aa, Artificial Sequence
  Description of Artificial Sequence: Synthetic polypeptide
TIHYNYMCNSPCMGGMNRRPILTIITLEDSSGNLLGRNSF

SEQ ID NO: 2092 - protein, 40 aa, Artificial Sequence
  Description of Artificial Sequence: Synthetic polypeptide
YNYMCNSPCMGGMNRRPILTIITLEDSSGNLLGRNSFEVR

SEQ ID NO: 2093 - protein, 40 aa, Artificial Sequence
  Description of Artificial Sequence: Synthetic polypeptide
YMCNSPCMGGMNRRPILTIITLEDSSGNLLGRNSFEVRVC

SEQ ID NO: 2094 - protein, 40 aa, Artificial Sequence
  Description of Artificial Sequence: Synthetic polypeptide
EYLDDRNTFRHSVVVPYEPPEVGSDCTTIHYNYMCNSSSM

SEQ ID NO: 2095 - protein, 40 aa, Artificial Sequence
  Description of Artificial Sequence: Synthetic polypeptide
YLDDRNTFRHSVVVPYEPPEVGSDCTTIHYNYMCNSSSMG

SEQ ID NO: 2096 - protein, 40 aa, Artificial Sequence
  Description of Artificial Sequence: Synthetic polypeptide
YEPPEVGSDCTTIHYNYMCNSSSMGGMNRRPILTIITLED

SEQ ID NO: 2097 - protein, 40 aa, Artificial Sequence
  Description of Artificial Sequence: Synthetic polypeptide
EPPEVGSDCTTIHYNYMCNSSSMGGMNRRPILTIITLEDS

SEQ ID NO: 2098 - protein, 40 aa, Artificial Sequence
  Description of Artificial Sequence: Synthetic polypeptide
PEVGSDCTTIHYNYMCNSSSMGGMNRRPILTIITLEDSSG

SEQ ID NO: 2099 - protein, 40 aa, Artificial Sequence
  Description of Artificial Sequence: Synthetic polypeptide
DCTTIHYNYMCNSSSMGGMNRRPILTIITLEDSSGNLLGR

SEQ ID NO: 2100 - protein, 40 aa, Artificial Sequence
  Description of Artificial Sequence: Synthetic polypeptide
DDRNTFRHSVVVPYEPPEVGSDCTTIHYNYMCNSSYMGGM

SEQ ID NO: 2101 - protein, 40 aa, Artificial Sequence
  Description of Artificial Sequence: Synthetic polypeptide
VPYEPPEVGSDCTTIHYNYMCNSSYMGGMNRRPILTIITL

SEQ ID NO: 2102 - protein, 40 aa, Artificial Sequence
  Description of Artificial Sequence: Synthetic polypeptide
HYNYMCNSSYMGGMNRRPILTIITLEDSSGNLLGRNSFEV

SEQ ID NO: 2103 - protein, 40 aa, Artificial Sequence
  Description of Artificial Sequence: Synthetic polypeptide
CNSSYMGGMNRRPILTIITLEDSSGNLLGRNSFEVRVCAC

SEQ ID NO: 2104 - protein, 40 aa, Artificial Sequence
  Description of Artificial Sequence: Synthetic polypeptide
SYMGGMNRRPILTIITLEDSSGNLLGRNSFEVRVCACPGR

SEQ ID NO: 2105 - protein, 40 aa, Artificial Sequence
  Description of Artificial Sequence: Synthetic polypeptide
TFRHSVVVPYEPPEVGSDCTTIHYNYMCNSSCIGGMNRRP

SEQ ID NO: 2106 - protein, 40 aa, Artificial Sequence
  Description of Artificial Sequence: Synthetic polypeptide
PYEPPEVGSDCTTIHYNYMCNSSCIGGMNRRPILTIITLE

SEQ ID NO: 2107 - protein, 40 aa, Artificial Sequence
  Description of Artificial Sequence: Synthetic polypeptide
EVGSDCTTIHYNYMCNSSCIGGMNRRPILTIITLEDSSGN

SEQ ID NO: 2108 - protein, 40 aa, Artificial Sequence
  Description of Artificial Sequence: Synthetic polypeptide
YMCNSSCIGGMNRRPILTIITLEDSSGNLLGRNSFEVRVC

SEQ ID NO: 2109 - protein, 40 aa, Artificial Sequence
  Description of Artificial Sequence: Synthetic polypeptide
CNSSCIGGMNRRPILTIITLEDSSGNLLGRNSFEVRVCAC

SEQ ID NO: 2110 - protein, 40 aa, Artificial Sequence
  Description of Artificial Sequence: Synthetic polypeptide
SSCIGGMNRRPILTIITLEDSSGNLLGRNSFEVRVCACPG

SEQ ID NO: 2111 - protein, 40 aa, Artificial Sequence
  Description of Artificial Sequence: Synthetic polypeptide
IGGMNRRPILTIITLEDSSGNLLGRNSFEVRVCACPGRDR

SEQ ID NO: 2112 - protein, 40 aa, Artificial Sequence
  Description of Artificial Sequence: Synthetic polypeptide
EVGSDCTTIHYNYMCNSSCMDGMNRRPILTIITLEDSSGN

SEQ ID NO: 2113 - protein, 40 aa, Artificial Sequence
  Description of Artificial Sequence: Synthetic polypeptide
YNYMCNSSCMDGMNRRPILTIITLEDSSGNLLGRNSFEVR

SEQ ID NO: 2114 - protein, 40 aa, Artificial Sequence
  Description of Artificial Sequence: Synthetic polypeptide
YMCNSSCMDGMNRRPILTIITLEDSSGNLLGRNSFEVRVC

SEQ ID NO: 2115 - protein, 40 aa, Artificial Sequence
  Description of Artificial Sequence: Synthetic polypeptide
CNSSCMDGMNRRPILTIITLEDSSGNLLGRNSFEVRVCAC

SEQ ID NO: 2116 - protein, 40 aa, Artificial Sequence
  Description of Artificial Sequence: Synthetic polypeptide
SSCMDGMNRRPILTIITLEDSSGNLLGRNSFEVRVCACPG

SEQ ID NO: 2117 - protein, 40 aa, Artificial Sequence
  Description of Artificial Sequence: Synthetic polypeptide
DGMNRRPILTIITLEDSSGNLLGRNSFEVRVCACPGRDRR

SEQ ID NO: 2118 - protein, 40 aa, Artificial Sequence
  Description of Artificial Sequence: Synthetic polypeptide
VGSDCTTIHYNYMCNSSCMSGMNRRPILTIITLEDSSGNL

SEQ ID NO: 2119 - protein, 40 aa, Artificial Sequence
  Description of Artificial Sequence: Synthetic polypeptide
GSDCTTIHYNYMCNSSCMSGMNRRPILTIITLEDSSGNLL

SEQ ID NO: 2120 - protein, 40 aa, Artificial Sequence
  Description of Artificial Sequence: Synthetic polypeptide
SDCTTIHYNYMCNSSCMSGMNRRPILTIITLEDSSGNLLG

SEQ ID NO: 2121 - protein, 40 aa, Artificial Sequence
  Description of Artificial Sequence: Synthetic polypeptide
YNYMCNSSCMSGMNRRPILTIITLEDSSGNLLGRNSFEVR

SEQ ID NO: 2122 - protein, 40 aa, Artificial Sequence
  Description of Artificial Sequence: Synthetic polypeptide
CNSSCMSGMNRRPILTIITLEDSSGNLLGRNSFEVRVCAC

SEQ ID NO: 2123 - protein, 40 aa, Artificial Sequence
  Description of Artificial Sequence: Synthetic polypeptide
MSGMNRRPILTIITLEDSSGNLLGRNSFEVRVCACPGRDR

SEQ ID NO: 2124 - protein, 40 aa, Artificial Sequence
  Description of Artificial Sequence: Synthetic polypeptide
SGMNRRPILTIITLEDSSGNLLGRNSFEVRVCACPGRDRR

SEQ ID NO: 2125 - protein, 40 aa, Artificial Sequence
  Description of Artificial Sequence: Synthetic polypeptide
CTTIHYNYMCNSSCMGDMNRRPILTIITLEDSSGNLLGRN

SEQ ID NO: 2126 - protein, 40 aa, Artificial Sequence
  Description of Artificial Sequence: Synthetic polypeptide
TIHYNYMCNSSCMGDMNRRPILTIITLEDSSGNLLGRNSF

SEQ ID NO: 2127 - protein, 40 aa, Artificial Sequence
  Description of Artificial Sequence: Synthetic polypeptide
YMCNSSCMGDMNRRPILTIITLEDSSGNLLGRNSFEVRVC

SEQ ID NO: 2128 - protein, 40 aa, Artificial Sequence
  Description of Artificial Sequence: Synthetic polypeptide
MCNSSCMGDMNRRPILTIITLEDSSGNLLGRNSFEVRVCA

SEQ ID NO: 2129 - protein, 40 aa, Artificial Sequence
  Description of Artificial Sequence: Synthetic polypeptide
NSSCMGDMNRRPILTIITLEDSSGNLLGRNSFEVRVCACP

SEQ ID NO: 2130 - protein, 40 aa, Artificial Sequence
  Description of Artificial Sequence: Synthetic polypeptide
CMGDMNRRPILTIITLEDSSGNLLGRNSFEVRVCACPGRD

SEQ ID NO: 2131 - protein, 40 aa, Artificial Sequence
  Description of Artificial Sequence: Synthetic polypeptide
NTFRHSVVVPYEPPEVGSDCTTIHYNYMCNSSCMGSMNRR

SEQ ID NO: 2132 - protein, 40 aa, Artificial Sequence
  Description of Artificial Sequence: Synthetic polypeptide
YEPPEVGSDCTTIHYNYMCNSSCMGSMNRRPILTIITLED

SEQ ID NO: 2133 - protein, 40 aa, Artificial Sequence
  Description of Artificial Sequence: Synthetic polypeptide
PEVGSDCTTIHYNYMCNSSCMGSMNRRPILTIITLEDSSG

SEQ ID NO: 2134 - protein, 40 aa, Artificial Sequence
  Description of Artificial Sequence: Synthetic polypeptide
EVGSDCTTIHYNYMCNSSCMGSMNRRPILTIITLEDSSGN

SEQ ID NO: 2135 - protein, 40 aa, Artificial Sequence
  Description of Artificial Sequence: Synthetic polypeptide
MCNSSCMGSMNRRPILTIITLEDSSGNLLGRNSFEVRVCA

SEQ ID NO: 2136 - protein, 40 aa, Artificial Sequence
  Description of Artificial Sequence: Synthetic polypeptide
NSSCMGSMNRRPILTIITLEDSSGNLLGRNSFEVRVCACP

SEQ ID NO: 2137 - protein, 40 aa, Artificial Sequence
  Description of Artificial Sequence: Synthetic polypeptide
MGSMNRRPILTIITLEDSSGNLLGRNSFEVRVCACPGRDR

SEQ ID NO: 2138 - protein, 40 aa, Artificial Sequence
  Description of Artificial Sequence: Synthetic polypeptide
GSMNRRPILTIITLEDSSGNLLGRNSFEVRVCACPGRDRR

SEQ ID NO: 2139 - protein, 40 aa, Artificial Sequence
  Description of Artificial Sequence: Synthetic polypeptide
FRHSVVVPYEPPEVGSDCTTIHYNYMCNSSCMGGTNRRPI

SEQ ID NO: 2140 - protein, 40 aa, Artificial Sequence
  Description of Artificial Sequence: Synthetic polypeptide
DCTTIHYNYMCNSSCMGGTNRRPILTIITLEDSSGNLLGR

SEQ ID NO: 2141 - protein, 40 aa, Artificial Sequence
  Description of Artificial Sequence: Synthetic polypeptide
CNSSCMGGTNRRPILTIITLEDSSGNLLGRNSFEVRVCAC

SEQ ID NO: 2142 - protein, 40 aa, Artificial Sequence
  Description of Artificial Sequence: Synthetic polypeptide
SCMGGTNRRPILTIITLEDSSGNLLGRNSFEVRVCACPGR

SEQ ID NO: 2143 - protein, 40 aa, Artificial Sequence
  Description of Artificial Sequence: Synthetic polypeptide
CMGGTNRRPILTIITLEDSSGNLLGRNSFEVRVCACPGRD

SEQ ID NO: 2144 - protein, 40 aa, Artificial Sequence
  Description of Artificial Sequence: Synthetic polypeptide
MGGTNRRPILTIITLEDSSGNLLGRNSFEVRVCACPGRDR

SEQ ID NO: 2145 - protein, 40 aa, Artificial Sequence
  Description of Artificial Sequence: Synthetic polypeptide
HYNYMCNSSCMGGVNRRPILTIITLEDSSGNLLGRNSFEV

SEQ ID NO: 2146 - protein, 40 aa, Artificial Sequence
  Description of Artificial Sequence: Synthetic polypeptide
YNYMCNSSCMGGVNRRPILTIITLEDSSGNLLGRNSFEVR

SEQ ID NO: 2147 - protein, 40 aa, Artificial Sequence
  Description of Artificial Sequence: Synthetic polypeptide
CNSSCMGGVNRRPILTIITLEDSSGNLLGRNSFEVRVCAC

SEQ ID NO: 2148 - protein, 40 aa, Artificial Sequence
  Description of Artificial Sequence: Synthetic polypeptide
SCMGGVNRRPILTIITLEDSSGNLLGRNSFEVRVCACPGR

SEQ ID NO: 2149 - protein, 40 aa, Artificial Sequence
  Description of Artificial Sequence: Synthetic polypeptide
GVNRRPILTIITLEDSSGNLLGRNSFEVRVCACPGRDRRT

SEQ ID NO: 2150 - protein, 40 aa, Artificial Sequence
  Description of Artificial Sequence: Synthetic polypeptide
SVVVPYEPPEVGSDCTTIHYNYMCNSSCMGGMIRRPILTI

SEQ ID NO: 2151 - protein, 40 aa, Artificial Sequence
  Description of Artificial Sequence: Synthetic polypeptide
VVVPYEPPEVGSDCTTIHYNYMCNSSCMGGMIRRPILTII

SEQ ID NO: 2152 - protein, 40 aa, Artificial Sequence
  Description of Artificial Sequence: Synthetic polypeptide
VPYEPPEVGSDCTTIHYNYMCNSSCMGGMIRRPILTIITL

SEQ ID NO: 2153 - protein, 40 aa, Artificial Sequence
  Description of Artificial Sequence: Synthetic polypeptide
MCNSSCMGGMIRRPILTIITLEDSSGNLLGRNSFEVRVCA

SEQ ID NO: 2154 - protein, 40 aa, Artificial Sequence
  Description of Artificial Sequence: Synthetic polypeptide
SSCMGGMIRRPILTIITLEDSSGNLLGRNSFEVRVCACPG

SEQ ID NO: 2155 - protein, 40 aa, Artificial Sequence
  Description of Artificial Sequence: Synthetic polypeptide
SVVVPYEPPEVGSDCTTIHYNYMCNSSCMGGMNQRPILTI

SEQ ID NO: 2156 - protein, 40 aa, Artificial Sequence
  Description of Artificial Sequence: Synthetic polypeptide
CNSSCMGGMNQRPILTIITLEDSSGNLLGRNSFEVRVCAC

SEQ ID NO: 2157 - protein, 40 aa, Artificial Sequence
  Description of Artificial Sequence: Synthetic polypeptide
CMGGMNQRPILTIITLEDSSGNLLGRNSFEVRVCACPGRD

SEQ ID NO: 2158 - protein, 40 aa, Artificial Sequence
  Description of Artificial Sequence: Synthetic polypeptide
MNQRPILTIITLEDSSGNLLGRNSFEVRVCACPGRDRRTE

SEQ ID NO: 2159 - protein, 40 aa, Artificial Sequence
  Description of Artificial Sequence: Synthetic polypeptide
HSVVVPYEPPEVGSDCTTIHYNYMCNSSCMGGMNWRPILT

SEQ ID NO: 2160 - protein, 40 aa, Artificial Sequence
  Description of Artificial Sequence: Synthetic polypeptide
GSDCTTIHYNYMCNSSCMGGMNWRPILTIITLEDSSGNLL

SEQ ID NO: 2161 - protein, 40 aa, Artificial Sequence
  Description of Artificial Sequence: Synthetic polypeptide
YMCNSSCMGGMNWRPILTIITLEDSSGNLLGRNSFEVRVC

SEQ ID NO: 2162 - protein, 40 aa, Artificial Sequence
  Description of Artificial Sequence: Synthetic polypeptide
MNWRPILTIITLEDSSGNLLGRNSFEVRVCACPGRDRRTE

SEQ ID NO: 2163 - protein, 40 aa, Artificial Sequence
  Description of Artificial Sequence: Synthetic polypeptide
NWRPILTIITLEDSSGNLLGRNSFEVRVCACPGRDRRTEE

SEQ ID NO: 2164 - protein, 40 aa, Artificial Sequence
  Description of Artificial Sequence: Synthetic polypeptide
TFRHSVVVPYEPPEVGSDCTTIHYNYMCNSSCMGGMNRGP

SEQ ID NO: 2165 - protein, 40 aa, Artificial Sequence
  Description of Artificial Sequence: Synthetic polypeptide
VGSDCTTIHYNYMCNSSCMGGMNRGPILTIITLEDSSGNL

SEQ ID NO: 2166 - protein, 40 aa, Artificial Sequence
  Description of Artificial Sequence: Synthetic polypeptide
YNYMCNSSCMGGMNRGPILTIITLEDSSGNLLGRNSFEVR

SEQ ID NO: 2167 - protein, 40 aa, Artificial Sequence
  Description of Artificial Sequence: Synthetic polypeptide
CNSSCMGGMNRGPILTIITLEDSSGNLLGRNSFEVRVCAC

SEQ ID NO: 2168 - protein, 40 aa, Artificial Sequence
  Description of Artificial Sequence: Synthetic polypeptide
NSSCMGGMNRGPILTIITLEDSSGNLLGRNSFEVRVCACP

SEQ ID NO: 2169 - protein, 40 aa, Artificial Sequence
  Description of Artificial Sequence: Synthetic polypeptide
CMGGMNRGPILTIITLEDSSGNLLGRNSFEVRVCACPGRD

SEQ ID NO: 2170 - protein, 40 aa, Artificial Sequence
  Description of Artificial Sequence: Synthetic polypeptide
RHSVVVPYEPPEVGSDCTTIHYNYMCNSSCMGGMNRMPIL

SEQ ID NO: 2171 - protein, 40 aa, Artificial Sequence
  Description of Artificial Sequence: Synthetic polypeptide
EVGSDCTTIHYNYMCNSSCMGGMNRMPILTIITLEDSSGN

SEQ ID NO: 2172 - protein, 40 aa, Artificial Sequence
  Description of Artificial Sequence: Synthetic polypeptide
SDCTTIHYNYMCNSSCMGGMNRMPILTIITLEDSSGNLLG

SEQ ID NO: 2173 - protein, 40 aa, Artificial Sequence
  Description of Artificial Sequence: Synthetic polypeptide
DCTTIHYNYMCNSSCMGGMNRMPILTIITLEDSSGNLLGR

SEQ ID NO: 2174 - protein, 40 aa, Artificial Sequence
  Description of Artificial Sequence: Synthetic polypeptide
YMCNSSCMGGMNRMPILTIITLEDSSGNLLGRNSFEVRVC

SEQ ID NO: 2175 - protein, 40 aa, Artificial Sequence
  Description of Artificial Sequence: Synthetic polypeptide
SCMGGMNRMPILTIITLEDSSGNLLGRNSFEVRVCACPGR

SEQ ID NO: 2176 - protein, 40 aa, Artificial Sequence
  Description of Artificial Sequence: Synthetic polypeptide
CMGGMNRMPILTIITLEDSSGNLLGRNSFEVRVCACPGRD

SEQ ID NO: 2177 - protein, 40 aa, Artificial Sequence
  Description of Artificial Sequence: Synthetic polypeptide
GGMNRMPILTIITLEDSSGNLLGRNSFEVRVCACPGRDRR

SEQ ID NO: 2178 - protein, 40 aa, Artificial Sequence
  Description of Artificial Sequence: Synthetic polypeptide
EPPEVGSDCTTIHYNYMCNSSCMGGMNRSPILTIITLEDS

SEQ ID NO: 2179 - protein, 40 aa, Artificial Sequence
  Description of Artificial Sequence: Synthetic polypeptide
NYMCNSSCMGGMNRSPILTIITLEDSSGNLLGRNSFEVRV

SEQ ID NO: 2180 - protein, 40 aa, Artificial Sequence
  Description of Artificial Sequence: Synthetic polypeptide
YMCNSSCMGGMNRSPILTIITLEDSSGNLLGRNSFEVRVC

SEQ ID NO: 2181 - protein, 40 aa, Artificial Sequence
  Description of Artificial Sequence: Synthetic polypeptide
MCNSSCMGGMNRSPILTIITLEDSSGNLLGRNSFEVRVCA

SEQ ID NO: 2182 - protein, 40 aa, Artificial Sequence
  Description of Artificial Sequence: Synthetic polypeptide
RSPILTIITLEDSSGNLLGRNSFEVRVCACPGRDRRTEEE

SEQ ID NO: 2183 - protein, 40 aa, Artificial Sequence
  Description of Artificial Sequence: Synthetic polypeptide
FRHSVVVPYEPPEVGSDCTTIHYNYMCNSSCMGGMNRRRI

SEQ ID NO: 2184 - protein, 40 aa, Artificial Sequence
  Description of Artificial Sequence: Synthetic polypeptide
VGSDCTTIHYNYMCNSSCMGGMNRRRILTIITLEDSSGNL

SEQ ID NO: 2185 - protein, 40 aa, Artificial Sequence
  Description of Artificial Sequence: Synthetic polypeptide
TIHYNYMCNSSCMGGMNRRRILTIITLEDSSGNLLGRNSF

SEQ ID NO: 2186 - protein, 40 aa, Artificial Sequence
  Description of Artificial Sequence: Synthetic polypeptide
YNYMCNSSCMGGMNRRRILTIITLEDSSGNLLGRNSFEVR

SEQ ID NO: 2187 - protein, 40 aa, Artificial Sequence
  Description of Artificial Sequence: Synthetic polypeptide
CNSSCMGGMNRRRILTIITLEDSSGNLLGRNSFEVRVCAC

SEQ ID NO: 2188 - protein, 40 aa, Artificial Sequence
  Description of Artificial Sequence: Synthetic polypeptide
CMGGMNRRRILTIITLEDSSGNLLGRNSFEVRVCACPGRD

SEQ ID NO: 2189 - protein, 40 aa, Artificial Sequence
  Description of Artificial Sequence: Synthetic polypeptide
RRILTIITLEDSSGNLLGRNSFEVRVCACPGRDRRTEEEN

SEQ ID NO: 2190 - protein, 40 aa, Artificial Sequence
  Description of Artificial Sequence: Synthetic polypeptide
PPEVGSDCTTIHYNYMCNSSCMGGMNRRPFLTIITLEDSS

SEQ ID NO: 2191 - protein, 40 aa, Artificial Sequence
  Description of Artificial Sequence: Synthetic polypeptide
YNYMCNSSCMGGMNRRPFLTIITLEDSSGNLLGRNSFEVR

SEQ ID NO: 2192 - protein, 40 aa, Artificial Sequence
  Description of Artificial Sequence: Synthetic polypeptide
MCNSSCMGGMNRRPFLTIITLEDSSGNLLGRNSFEVRVCA

SEQ ID NO: 2193 - protein, 40 aa, Artificial Sequence
  Description of Artificial Sequence: Synthetic polypeptide
NSSCMGGMNRRPFLTIITLEDSSGNLLGRNSFEVRVCACP

SEQ ID NO: 2194 - protein, 40 aa, Artificial Sequence
  Description of Artificial Sequence: Synthetic polypeptide
SSCMGGMNRRPFLTIITLEDSSGNLLGRNSFEVRVCACPG

SEQ ID NO: 2195 - protein, 40 aa, Artificial Sequence
  Description of Artificial Sequence: Synthetic polypeptide
MGGMNRRPFLTIITLEDSSGNLLGRNSFEVRVCACPGRDR

SEQ ID NO: 2196 - protein, 40 aa, Artificial Sequence
  Description of Artificial Sequence: Synthetic polypeptide
YEPPEVGSDCTTIHYNYMCNSSCMGGMNRRPNLTIITLED

SEQ ID NO: 2197 - protein, 40 aa, Artificial Sequence
  Description of Artificial Sequence: Synthetic polypeptide
PEVGSDCTTIHYNYMCNSSCMGGMNRRPNLTIITLEDSSG

SEQ ID NO: 2198 - protein, 40 aa, Artificial Sequence
  Description of Artificial Sequence: Synthetic polypeptide
SDCTTIHYNYMCNSSCMGGMNRRPNLTIITLEDSSGNLLG

SEQ ID NO: 2199 - protein, 40 aa, Artificial Sequence
  Description of Artificial Sequence: Synthetic polypeptide
DCTTIHYNYMCNSSCMGGMNRRPNLTIITLEDSSGNLLGR

SEQ ID NO: 2200 - protein, 40 aa, Artificial Sequence
  Description of Artificial Sequence: Synthetic polypeptide
IHYNYMCNSSCMGGMNRRPNLTIITLEDSSGNLLGRNSFE

SEQ ID NO: 2201 - protein, 40 aa, Artificial Sequence
  Description of Artificial Sequence: Synthetic polypeptide
YNYMCNSSCMGGMNRRPNLTIITLEDSSGNLLGRNSFEVR

SEQ ID NO: 2202 - protein, 40 aa, Artificial Sequence
  Description of Artificial Sequence: Synthetic polypeptide
MCNSSCMGGMNRRPNLTIITLEDSSGNLLGRNSFEVRVCA

SEQ ID NO: 2203 - protein, 40 aa, Artificial Sequence
  Description of Artificial Sequence: Synthetic polypeptide
SSCMGGMNRRPNLTIITLEDSSGNLLGRNSFEVRVCACPG

SEQ ID NO: 2204 - protein, 40 aa, Artificial Sequence
  Description of Artificial Sequence: Synthetic polypeptide
SCMGGMNRRPNLTIITLEDSSGNLLGRNSFEVRVCACPGR

SEQ ID NO: 2205 - protein, 40 aa, Artificial Sequence
  Description of Artificial Sequence: Synthetic polypeptide
CMGGMNRRPNLTIITLEDSSGNLLGRNSFEVRVCACPGRD

SEQ ID NO: 2206 - protein, 40 aa, Artificial Sequence
  Description of Artificial Sequence: Synthetic polypeptide
MGGMNRRPNLTIITLEDSSGNLLGRNSFEVRVCACPGRDR

SEQ ID NO: 2207 - protein, 40 aa, Artificial Sequence
  Description of Artificial Sequence: Synthetic polypeptide
GGMNRRPNLTIITLEDSSGNLLGRNSFEVRVCACPGRDRR

SEQ ID NO: 2208 - protein, 40 aa, Artificial Sequence
  Description of Artificial Sequence: Synthetic polypeptide
RRPNLTIITLEDSSGNLLGRNSFEVRVCACPGRDRRTEEE

SEQ ID NO: 2209 - protein, 40 aa, Artificial Sequence
  Description of Artificial Sequence: Synthetic polypeptide
VPYEPPEVGSDCTTIHYNYMCNSSCMGGMNRRPILAIITL

SEQ ID NO: 2210 - protein, 40 aa, Artificial Sequence
  Description of Artificial Sequence: Synthetic polypeptide
IHYNYMCNSSCMGGMNRRPILAIITLEDSSGNLLGRNSFE

SEQ ID NO: 2211 - protein, 40 aa, Artificial Sequence
  Description of Artificial Sequence: Synthetic polypeptide
HYNYMCNSSCMGGMNRRPILAIITLEDSSGNLLGRNSFEV

SEQ ID NO: 2212 - protein, 40 aa, Artificial Sequence
  Description of Artificial Sequence: Synthetic polypeptide
MGGMNRRPILAIITLEDSSGNLLGRNSFEVRVCACPGRDR

SEQ ID NO: 2213 - protein, 40 aa, Artificial Sequence
  Description of Artificial Sequence: Synthetic polypeptide
RRPILAIITLEDSSGNLLGRNSFEVRVCACPGRDRRTEEE

SEQ ID NO: 2214 - protein, 40 aa, Artificial Sequence
  Description of Artificial Sequence: Synthetic polypeptide
SDCTTIHYNYMCNSSCMGGMNRRPILTSITLEDSSGNLLG

SEQ ID NO: 2215 - protein, 40 aa, Artificial Sequence
  Description of Artificial Sequence: Synthetic polypeptide
IHYNYMCNSSCMGGMNRRPILTSITLEDSSGNLLGRNSFE

SEQ ID NO: 2216 - protein, 40 aa, Artificial Sequence
  Description of Artificial Sequence: Synthetic polypeptide
YMCNSSCMGGMNRRPILTSITLEDSSGNLLGRNSFEVRVC

SEQ ID NO: 2217 - protein, 40 aa, Artificial Sequence
  Description of Artificial Sequence: Synthetic polypeptide
MCNSSCMGGMNRRPILTSITLEDSSGNLLGRNSFEVRVCA

SEQ ID NO: 2218 - protein, 40 aa, Artificial Sequence
  Description of Artificial Sequence: Synthetic polypeptide
SCMGGMNRRPILTSITLEDSSGNLLGRNSFEVRVCACPGR

SEQ ID NO: 2219 - protein, 40 aa, Artificial Sequence
  Description of Artificial Sequence: Synthetic polypeptide
ILTSITLEDSSGNLLGRNSFEVRVCACPGRDRRTEEENLR

SEQ ID NO: 2220 - protein, 40 aa, Artificial Sequence
  Description of Artificial Sequence: Synthetic polypeptide
SDCTTIHYNYMCNSSCMGGMNRRPILTITTLEDSSGNLLG

SEQ ID NO: 2221 - protein, 40 aa, Artificial Sequence
  Description of Artificial Sequence: Synthetic polypeptide
MCNSSCMGGMNRRPILTITTLEDSSGNLLGRNSFEVRVCA

SEQ ID NO: 2222 - protein, 40 aa, Artificial Sequence
  Description of Artificial Sequence: Synthetic polypeptide
NSSCMGGMNRRPILTITTLEDSSGNLLGRNSFEVRVCACP

SEQ ID NO: 2223 - protein, 40 aa, Artificial Sequence
  Description of Artificial Sequence: Synthetic polypeptide
MGGMNRRPILTITTLEDSSGNLLGRNSFEVRVCACPGRDR

SEQ ID NO: 2224 - protein, 40 aa, Artificial Sequence
  Description of Artificial Sequence: Synthetic polypeptide
TITTLEDSSGNLLGRNSFEVRVCACPGRDRRTEEENLRKK

SEQ ID NO: 2225 - protein, 40 aa, Artificial Sequence
  Description of Artificial Sequence: Synthetic polypeptide
EPPEVGSDCTTIHYNYMCNSSCMGGMNRRPILTIIILEDS

SEQ ID NO: 2226 - protein, 40 aa, Artificial Sequence
  Description of Artificial Sequence: Synthetic polypeptide
NYMCNSSCMGGMNRRPILTIIILEDSSGNLLGRNSFEVRV

SEQ ID NO: 2227 - protein, 40 aa, Artificial Sequence
  Description of Artificial Sequence: Synthetic polypeptide
YMCNSSCMGGMNRRPILTIIILEDSSGNLLGRNSFEVRVC

SEQ ID NO: 2228 - protein, 40 aa, Artificial Sequence
  Description of Artificial Sequence: Synthetic polypeptide
CNSSCMGGMNRRPILTIIILEDSSGNLLGRNSFEVRVCAC

SEQ ID NO: 2229 - protein, 40 aa, Artificial Sequence
  Description of Artificial Sequence: Synthetic polypeptide
NSSCMGGMNRRPILTIIILEDSSGNLLGRNSFEVRVCACP

SEQ ID NO: 2230 - protein, 40 aa, Artificial Sequence
  Description of Artificial Sequence: Synthetic polypeptide
SSCMGGMNRRPILTIIILEDSSGNLLGRNSFEVRVCACPG

SEQ ID NO: 2231 - protein, 40 aa, Artificial Sequence
  Description of Artificial Sequence: Synthetic polypeptide
SCMGGMNRRPILTIIILEDSSGNLLGRNSFEVRVCACPGR

SEQ ID NO: 2232 - protein, 40 aa, Artificial Sequence
  Description of Artificial Sequence: Synthetic polypeptide
GGMNRRPILTIIILEDSSGNLLGRNSFEVRVCACPGRDRR

SEQ ID NO: 2233 - protein, 40 aa, Artificial Sequence
  Description of Artificial Sequence: Synthetic polypeptide
NRRPILTIIILEDSSGNLLGRNSFEVRVCACPGRDRRTEE

SEQ ID NO: 2234 - protein, 40 aa, Artificial Sequence
  Description of Artificial Sequence: Synthetic polypeptide
RRPILTIIILEDSSGNLLGRNSFEVRVCACPGRDRRTEEE

SEQ ID NO: 2235 - protein, 40 aa, Artificial Sequence
  Description of Artificial Sequence: Synthetic polypeptide
IILEDSSGNLLGRNSFEVRVCACPGRDRRTEEENLRKKGE

SEQ ID NO: 2236 - protein, 40 aa, Artificial Sequence
  Description of Artificial Sequence: Synthetic polypeptide
SDCTTIHYNYMCNSSCMGGMNRRPILTIITREDSSGNLLG

SEQ ID NO: 2237 - protein, 40 aa, Artificial Sequence
  Description of Artificial Sequence: Synthetic polypeptide
DCTTIHYNYMCNSSCMGGMNRRPILTIITREDSSGNLLGR

SEQ ID NO: 2238 - protein, 40 aa, Artificial Sequence
  Description of Artificial Sequence: Synthetic polypeptide
HYNYMCNSSCMGGMNRRPILTIITREDSSGNLLGRNSFEV

SEQ ID NO: 2239 - protein, 40 aa, Artificial Sequence
  Description of Artificial Sequence: Synthetic polypeptide
NYMCNSSCMGGMNRRPILTIITREDSSGNLLGRNSFEVRV

SEQ ID NO: 2240 - protein, 40 aa, Artificial Sequence
  Description of Artificial Sequence: Synthetic polypeptide
YMCNSSCMGGMNRRPILTIITREDSSGNLLGRNSFEVRVC

SEQ ID NO: 2241 - protein, 40 aa, Artificial Sequence
  Description of Artificial Sequence: Synthetic polypeptide
MCNSSCMGGMNRRPILTIITREDSSGNLLGRNSFEVRVCA

SEQ ID NO: 2242 - protein, 40 aa, Artificial Sequence
  Description of Artificial Sequence: Synthetic polypeptide
CNSSCMGGMNRRPILTIITREDSSGNLLGRNSFEVRVCAC

SEQ ID NO: 2243 - protein, 40 aa, Artificial Sequence
  Description of Artificial Sequence: Synthetic polypeptide
SSCMGGMNRRPILTIITREDSSGNLLGRNSFEVRVCACPG

SEQ ID NO: 2244 - protein, 40 aa, Artificial Sequence
  Description of Artificial Sequence: Synthetic polypeptide
SCMGGMNRRPILTIITREDSSGNLLGRNSFEVRVCACPGR

SEQ ID NO: 2245 - protein, 40 aa, Artificial Sequence
  Description of Artificial Sequence: Synthetic polypeptide
NRRPILTIITREDSSGNLLGRNSFEVRVCACPGRDRRTEE

SEQ ID NO: 2246 - protein, 40 aa, Artificial Sequence
  Description of Artificial Sequence: Synthetic polypeptide
TIITREDSSGNLLGRNSFEVRVCACPGRDRRTEEENLRKK

SEQ ID NO: 2247 - protein, 40 aa, Artificial Sequence
  Description of Artificial Sequence: Synthetic polypeptide
IITREDSSGNLLGRNSFEVRVCACPGRDRRTEEENLRKKG

SEQ ID NO: 2248 - protein, 40 aa, Artificial Sequence
  Description of Artificial Sequence: Synthetic polypeptide
ITREDSSGNLLGRNSFEVRVCACPGRDRRTEEENLRKKGE

SEQ ID NO: 2249 - protein, 40 aa, Artificial Sequence
  Description of Artificial Sequence: Synthetic polypeptide
YEPPEVGSDCTTIHYNYMCNSSCMGGMNRRPILTIITLDD

SEQ ID NO: 2250 - protein, 40 aa, Artificial Sequence
  Description of Artificial Sequence: Synthetic polypeptide
NSSCMGGMNRRPILTIITLDDSSGNLLGRNSFEVRVCACP

SEQ ID NO: 2251 - protein, 40 aa, Artificial Sequence
  Description of Artificial Sequence: Synthetic polypeptide
MGGMNRRPILTIITLDDSSGNLLGRNSFEVRVCACPGRDR

SEQ ID NO: 2252 - protein, 40 aa, Artificial Sequence
  Description of Artificial Sequence: Synthetic polypeptide
PILTIITLDDSSGNLLGRNSFEVRVCACPGRDRRTEEENL

SEQ ID NO: 2253 - protein, 40 aa, Artificial Sequence
  Description of Artificial Sequence: Synthetic polypeptide
ILTIITLDDSSGNLLGRNSFEVRVCACPGRDRRTEEENLR

SEQ ID NO: 2254 - protein, 40 aa, Artificial Sequence
  Description of Artificial Sequence: Synthetic polypeptide
IITLDDSSGNLLGRNSFEVRVCACPGRDRRTEEENLRKKG

SEQ ID NO: 2255 - protein, 40 aa, Artificial Sequence
  Description of Artificial Sequence: Synthetic polypeptide
LDDSSGNLLGRNSFEVRVCACPGRDRRTEEENLRKKGEPH

SEQ ID NO: 2256 - protein, 40 aa, Artificial Sequence
  Description of Artificial Sequence: Synthetic polypeptide
PYEPPEVGSDCTTIHYNYMCNSSCMGGMNRRPILTIITLG

SEQ ID NO: 2257 - protein, 40 aa, Artificial Sequence
  Description of Artificial Sequence: Synthetic polypeptide
YEPPEVGSDCTTIHYNYMCNSSCMGGMNRRPILTIITLGD

SEQ ID NO: 2258 - protein, 40 aa, Artificial Sequence
  Description of Artificial Sequence: Synthetic polypeptide
PPEVGSDCTTIHYNYMCNSSCMGGMNRRPILTIITLGDSS

SEQ ID NO: 2259 - protein, 40 aa, Artificial Sequence
  Description of Artificial Sequence: Synthetic polypeptide
NYMCNSSCMGGMNRRPILTIITLGDSSGNLLGRNSFEVRV

SEQ ID NO: 2260 - protein, 40 aa, Artificial Sequence
  Description of Artificial Sequence: Synthetic polypeptide
NSSCMGGMNRRPILTIITLGDSSGNLLGRNSFEVRVCACP

SEQ ID NO: 2261 - protein, 40 aa, Artificial Sequence
  Description of Artificial Sequence: Synthetic polypeptide
SSCMGGMNRRPILTIITLGDSSGNLLGRNSFEVRVCACPG

SEQ ID NO: 2262 - protein, 40 aa, Artificial Sequence
  Description of Artificial Sequence: Synthetic polypeptide
SCMGGMNRRPILTIITLGDSSGNLLGRNSFEVRVCACPGR

SEQ ID NO: 2263 - protein, 40 aa, Artificial Sequence
  Description of Artificial Sequence: Synthetic polypeptide
RRPILTIITLGDSSGNLLGRNSFEVRVCACPGRDRRTEEE

SEQ ID NO: 2264 - protein, 40 aa, Artificial Sequence
  Description of Artificial Sequence: Synthetic polypeptide
ILTIITLGDSSGNLLGRNSFEVRVCACPGRDRRTEEENLR

SEQ ID NO: 2265 - protein, 40 aa, Artificial Sequence
  Description of Artificial Sequence: Synthetic polypeptide
YEPPEVGSDCTTIHYNYMCNSSCMGGMNRRPILTIITLKD

SEQ ID NO: 2266 - protein, 40 aa, Artificial Sequence
  Description of Artificial Sequence: Synthetic polypeptide
PPEVGSDCTTIHYNYMCNSSCMGGMNRRPILTIITLKDSS

SEQ ID NO: 2267 - protein, 40 aa, Artificial Sequence
  Description of Artificial Sequence: Synthetic polypeptide
VGSDCTTIHYNYMCNSSCMGGMNRRPILTIITLKDSSGNL

SEQ ID NO: 2268 - protein, 40 aa, Artificial Sequence
  Description of Artificial Sequence: Synthetic polypeptide
YMCNSSCMGGMNRRPILTIITLKDSSGNLLGRNSFEVRVC

SEQ ID NO: 2269 - protein, 40 aa, Artificial Sequence
  Description of Artificial Sequence: Synthetic polypeptide
CNSSCMGGMNRRPILTIITLKDSSGNLLGRNSFEVRVCAC

SEQ ID NO: 2270 - protein, 40 aa, Artificial Sequence
  Description of Artificial Sequence: Synthetic polypeptide
CMGGMNRRPILTIITLKDSSGNLLGRNSFEVRVCACPGRD

SEQ ID NO: 2271 - protein, 40 aa, Artificial Sequence
  Description of Artificial Sequence: Synthetic polypeptide
YMCNSSCMGGMNRRPILTIITLEVSSGNLLGRNSFEVRVC

SEQ ID NO: 2272 - protein, 40 aa, Artificial Sequence
  Description of Artificial Sequence: Synthetic polypeptide
SSCMGGMNRRPILTIITLEVSSGNLLGRNSFEVRVCACPG

SEQ ID NO: 2273 - protein, 40 aa, Artificial Sequence
  Description of Artificial Sequence: Synthetic polypeptide
MGGMNRRPILTIITLEVSSGNLLGRNSFEVRVCACPGRDR

SEQ ID NO: 2274 - protein, 40 aa, Artificial Sequence
  Description of Artificial Sequence: Synthetic polypeptide
LTIITLEVSSGNLLGRNSFEVRVCACPGRDRRTEEENLRK

SEQ ID NO: 2275 - protein, 40 aa, Artificial Sequence
  Description of Artificial Sequence: Synthetic polypeptide
YEPPEVGSDCTTIHYNYMCNSSCMGGMNRRPILTIITLEY

SEQ ID NO: 2276 - protein, 40 aa, Artificial Sequence
  Description of Artificial Sequence: Synthetic polypeptide
YNYMCNSSCMGGMNRRPILTIITLEYSSGNLLGRNSFEVR

SEQ ID NO: 2277 - protein, 40 aa, Artificial Sequence
  Description of Artificial Sequence: Synthetic polypeptide
NYMCNSSCMGGMNRRPILTIITLEYSSGNLLGRNSFEVRV

SEQ ID NO: 2278 - protein, 40 aa, Artificial Sequence
  Description of Artificial Sequence: Synthetic polypeptide
YMCNSSCMGGMNRRPILTIITLEYSSGNLLGRNSFEVRVC

SEQ ID NO: 2279 - protein, 40 aa, Artificial Sequence
  Description of Artificial Sequence: Synthetic polypeptide
NSSCMGGMNRRPILTIITLEYSSGNLLGRNSFEVRVCACP

SEQ ID NO: 2280 - protein, 40 aa, Artificial Sequence
  Description of Artificial Sequence: Synthetic polypeptide
CMGGMNRRPILTIITLEYSSGNLLGRNSFEVRVCACPGRD

SEQ ID NO: 2281 - protein, 40 aa, Artificial Sequence
  Description of Artificial Sequence: Synthetic polypeptide
RPILTIITLEYSSGNLLGRNSFEVRVCACPGRDRRTEEEN

SEQ ID NO: 2282 - protein, 40 aa, Artificial Sequence
  Description of Artificial Sequence: Synthetic polypeptide
ILTIITLEYSSGNLLGRNSFEVRVCACPGRDRRTEEENLR

SEQ ID NO: 2283 - protein, 40 aa, Artificial Sequence
  Description of Artificial Sequence: Synthetic polypeptide
LTIITLEYSSGNLLGRNSFEVRVCACPGRDRRTEEENLRK

SEQ ID NO: 2284 - protein, 40 aa, Artificial Sequence
  Description of Artificial Sequence: Synthetic polypeptide
MCNSSCMGGMNRRPILTIITLEDSSVNLLGRNSFEVRVCA

SEQ ID NO: 2285 - protein, 40 aa, Artificial Sequence
  Description of Artificial Sequence: Synthetic polypeptide
MNRRPILTIITLEDSSVNLLGRNSFEVRVCACPGRDRRTE

SEQ ID NO: 2286 - protein, 40 aa, Artificial Sequence
  Description of Artificial Sequence: Synthetic polypeptide
PILTIITLEDSSVNLLGRNSFEVRVCACPGRDRRTEEENL

SEQ ID NO: 2287 - protein, 40 aa, Artificial Sequence
  Description of Artificial Sequence: Synthetic polypeptide
YNYMCNSSCMGGMNRRPILTIITLEDSSGNLPGRNSFEVR

SEQ ID NO: 2288 - protein, 40 aa, Artificial Sequence
  Description of Artificial Sequence: Synthetic polypeptide
NYMCNSSCMGGMNRRPILTIITLEDSSGNLPGRNSFEVRV

SEQ ID NO: 2289 - protein, 40 aa, Artificial Sequence
  Description of Artificial Sequence: Synthetic polypeptide
YMCNSSCMGGMNRRPILTIITLEDSSGNLPGRNSFEVRVC

SEQ ID NO: 2290 - protein, 40 aa, Artificial Sequence
  Description of Artificial Sequence: Synthetic polypeptide
SSCMGGMNRRPILTIITLEDSSGNLPGRNSFEVRVCACPG

SEQ ID NO: 2291 - protein, 40 aa, Artificial Sequence
  Description of Artificial Sequence: Synthetic polypeptide
SCMGGMNRRPILTIITLEDSSGNLPGRNSFEVRVCACPGR

SEQ ID NO: 2292 - protein, 40 aa, Artificial Sequence
  Description of Artificial Sequence: Synthetic polypeptide
GMNRRPILTIITLEDSSGNLPGRNSFEVRVCACPGRDRRT

SEQ ID NO: 2293 - protein, 40 aa, Artificial Sequence
  Description of Artificial Sequence: Synthetic polypeptide
PILTIITLEDSSGNLPGRNSFEVRVCACPGRDRRTEEENL

SEQ ID NO: 2294 - protein, 40 aa, Artificial Sequence
  Description of Artificial Sequence: Synthetic polypeptide
DCTTIHYNYMCNSSCMGGMNRRPILTIITLEDSSGNLLRR

SEQ ID NO: 2295 - protein, 40 aa, Artificial Sequence
  Description of Artificial Sequence: Synthetic polypeptide
TIHYNYMCNSSCMGGMNRRPILTIITLEDSSGNLLRRNSF

SEQ ID NO: 2296 - protein, 40 aa, Artificial Sequence
  Description of Artificial Sequence: Synthetic polypeptide
YNYMCNSSCMGGMNRRPILTIITLEDSSGNLLRRNSFEVR

SEQ ID NO: 2297 - protein, 40 aa, Artificial Sequence
  Description of Artificial Sequence: Synthetic polypeptide
NYMCNSSCMGGMNRRPILTIITLEDSSGNLLRRNSFEVRV

SEQ ID NO: 2298 - protein, 40 aa, Artificial Sequence
  Description of Artificial Sequence: Synthetic polypeptide
YMCNSSCMGGMNRRPILTIITLEDSSGNLLRRNSFEVRVC

SEQ ID NO: 2299 - protein, 40 aa, Artificial Sequence
  Description of Artificial Sequence: Synthetic polypeptide
MCNSSCMGGMNRRPILTIITLEDSSGNLLRRNSFEVRVCA

SEQ ID NO: 2300 - protein, 40 aa, Artificial Sequence
  Description of Artificial Sequence: Synthetic polypeptide
CNSSCMGGMNRRPILTIITLEDSSGNLLRRNSFEVRVCAC

SEQ ID NO: 2301 - protein, 40 aa, Artificial Sequence
  Description of Artificial Sequence: Synthetic polypeptide
NSSCMGGMNRRPILTIITLEDSSGNLLRRNSFEVRVCACP

SEQ ID NO: 2302 - protein, 40 aa, Artificial Sequence
  Description of Artificial Sequence: Synthetic polypeptide
SSCMGGMNRRPILTIITLEDSSGNLLRRNSFEVRVCACPG

SEQ ID NO: 2303 - protein, 40 aa, Artificial Sequence
  Description of Artificial Sequence: Synthetic polypeptide
TLEDSSGNLLRRNSFEVRVCACPGRDRRTEEENLRKKGEP

SEQ ID NO: 2304 - protein, 40 aa, Artificial Sequence
  Description of Artificial Sequence: Synthetic polypeptide
LEDSSGNLLRRNSFEVRVCACPGRDRRTEEENLRKKGEPH

SEQ ID NO: 2305 - protein, 40 aa, Artificial Sequence
  Description of Artificial Sequence: Synthetic polypeptide
NYMCNSSCMGGMNRRPILTIITLEDSSGNLLVRNSFEVRV

SEQ ID NO: 2306 - protein, 40 aa, Artificial Sequence
  Description of Artificial Sequence: Synthetic polypeptide
MCNSSCMGGMNRRPILTIITLEDSSGNLLVRNSFEVRVCA

SEQ ID NO: 2307 - protein, 40 aa, Artificial Sequence
  Description of Artificial Sequence: Synthetic polypeptide
SCMGGMNRRPILTIITLEDSSGNLLVRNSFEVRVCACPGR

SEQ ID NO: 2308 - protein, 40 aa, Artificial Sequence
  Description of Artificial Sequence: Synthetic polypeptide
MGGMNRRPILTIITLEDSSGNLLVRNSFEVRVCACPGRDR

SEQ ID NO: 2309 - protein, 40 aa, Artificial Sequence
  Description of Artificial Sequence: Synthetic polypeptide
GGMNRRPILTIITLEDSSGNLLVRNSFEVRVCACPGRDRR

SEQ ID NO: 2310 - protein, 40 aa, Artificial Sequence
  Description of Artificial Sequence: Synthetic polypeptide
GMNRRPILTIITLEDSSGNLLVRNSFEVRVCACPGRDRRT

SEQ ID NO: 2311 - protein, 40 aa, Artificial Sequence
  Description of Artificial Sequence: Synthetic polypeptide
CTTIHYNYMCNSSCMGGMNRRPILTIITLEDSSGNLLGQN

SEQ ID NO: 2312 - protein, 40 aa, Artificial Sequence
  Description of Artificial Sequence: Synthetic polypeptide
HYNYMCNSSCMGGMNRRPILTIITLEDSSGNLLGQNSFEV

SEQ ID NO: 2313 - protein, 40 aa, Artificial Sequence
  Description of Artificial Sequence: Synthetic polypeptide
NSSCMGGMNRRPILTIITLEDSSGNLLGQNSFEVRVCACP

SEQ ID NO: 2314 - protein, 40 aa, Artificial Sequence
  Description of Artificial Sequence: Synthetic polypeptide
MGGMNRRPILTIITLEDSSGNLLGQNSFEVRVCACPGRDR

SEQ ID NO: 2315 - protein, 40 aa, Artificial Sequence
  Description of Artificial Sequence: Synthetic polypeptide
GMNRRPILTIITLEDSSGNLLGQNSFEVRVCACPGRDRRT

SEQ ID NO: 2316 - protein, 40 aa, Artificial Sequence
  Description of Artificial Sequence: Synthetic polypeptide
SSGNLLGQNSFEVRVCACPGRDRRTEEENLRKKGEPHHEL

SEQ ID NO: 2317 - protein, 40 aa, Artificial Sequence
  Description of Artificial Sequence: Synthetic polypeptide
GQNSFEVRVCACPGRDRRTEEENLRKKGEPHHELPPGSTK

SEQ ID NO: 2318 - protein, 40 aa, Artificial Sequence
  Description of Artificial Sequence: Synthetic polypeptide
QNSFEVRVCACPGRDRRTEEENLRKKGEPHHELPPGSTKR

SEQ ID NO: 2319 - protein, 40 aa, Artificial Sequence
  Description of Artificial Sequence: Synthetic polypeptide
DCTTIHYNYMCNSSCMGGMNRRPILTIITLEDSSGNLLGW

SEQ ID NO: 2320 - protein, 40 aa, Artificial Sequence
  Description of Artificial Sequence: Synthetic polypeptide
MCNSSCMGGMNRRPILTIITLEDSSGNLLGWNSFEVRVCA

SEQ ID NO: 2321 - protein, 40 aa, Artificial Sequence
  Description of Artificial Sequence: Synthetic polypeptide
ITLEDSSGNLLGWNSFEVRVCACPGRDRRTEEENLRKKGE

SEQ ID NO: 2322 - protein, 40 aa, Artificial Sequence
  Description of Artificial Sequence: Synthetic polypeptide
TIHYNYMCNSSCMGGMNRRPILTIITLEDSSGNLLGRNSS

SEQ ID NO: 2323 - protein, 40 aa, Artificial Sequence
  Description of Artificial Sequence: Synthetic polypeptide
HYNYMCNSSCMGGMNRRPILTIITLEDSSGNLLGRNSSEV

SEQ ID NO: 2324 - protein, 40 aa, Artificial Sequence
  Description of Artificial Sequence: Synthetic polypeptide
YNYMCNSSCMGGMNRRPILTIITLEDSSGNLLGRNSSEVR

SEQ ID NO: 2325 - protein, 40 aa, Artificial Sequence
  Description of Artificial Sequence: Synthetic polypeptide
YMCNSSCMGGMNRRPILTIITLEDSSGNLLGRNSSEVRVC

SEQ ID NO: 2326 - protein, 40 aa, Artificial Sequence
  Description of Artificial Sequence: Synthetic polypeptide
GGMNRRPILTIITLEDSSGNLLGRNSSEVRVCACPGRDRR

SEQ ID NO: 2327 - protein, 40 aa, Artificial Sequence
  Description of Artificial Sequence: Synthetic polypeptide
MNRRPILTIITLEDSSGNLLGRNSSEVRVCACPGRDRRTE

SEQ ID NO: 2328 - protein, 40 aa, Artificial Sequence
  Description of Artificial Sequence: Synthetic polypeptide
SSGNLLGRNSSEVRVCACPGRDRRTEEENLRKKGEPHHEL

SEQ ID NO: 2329 - protein, 40 aa, Artificial Sequence
  Description of Artificial Sequence: Synthetic polypeptide
SGNLLGRNSSEVRVCACPGRDRRTEEENLRKKGEPHHELP

SEQ ID NO: 2330 - protein, 40 aa, Artificial Sequence
  Description of Artificial Sequence: Synthetic polypeptide
MCNSSCMGGMNRRPILTIITLEDSSGNLLGRNSVEVRVCA

SEQ ID NO: 2331 - protein, 40 aa, Artificial Sequence
  Description of Artificial Sequence: Synthetic polypeptide
CMGGMNRRPILTIITLEDSSGNLLGRNSVEVRVCACPGRD

SEQ ID NO: 2332 - protein, 40 aa, Artificial Sequence
  Description of Artificial Sequence: Synthetic polypeptide
GGMNRRPILTIITLEDSSGNLLGRNSVEVRVCACPGRDRR

SEQ ID NO: 2333 - protein, 40 aa, Artificial Sequence
  Description of Artificial Sequence: Synthetic polypeptide
GMNRRPILTIITLEDSSGNLLGRNSVEVRVCACPGRDRRT

SEQ ID NO: 2334 - protein, 40 aa, Artificial Sequence
  Description of Artificial Sequence: Synthetic polypeptide
NRRPILTIITLEDSSGNLLGRNSVEVRVCACPGRDRRTEE

SEQ ID NO: 2335 - protein, 40 aa, Artificial Sequence
  Description of Artificial Sequence: Synthetic polypeptide
TLEDSSGNLLGRNSVEVRVCACPGRDRRTEEENLRKKGEP

SEQ ID NO: 2336 - protein, 40 aa, Artificial Sequence
  Description of Artificial Sequence: Synthetic polypeptide
LEDSSGNLLGRNSVEVRVCACPGRDRRTEEENLRKKGEPH

SEQ ID NO: 2337 - protein, 40 aa, Artificial Sequence
  Description of Artificial Sequence: Synthetic polypeptide
MCNSSCMGGMNRRPILTIITLEDSSGNLLGRNSFKVRVCA

SEQ ID NO: 2338 - protein, 40 aa, Artificial Sequence
  Description of Artificial Sequence: Synthetic polypeptide
NSSCMGGMNRRPILTIITLEDSSGNLLGRNSFKVRVCACP

SEQ ID NO: 2339 - protein, 40 aa, Artificial Sequence
  Description of Artificial Sequence: Synthetic polypeptide
IITLEDSSGNLLGRNSFVVRVCACPGRDRRTEEENLRKKG

SEQ ID NO: 2340 - protein, 40 aa, Artificial Sequence
  Description of Artificial Sequence: Synthetic polypeptide
SGNLLGRNSFVVRVCACPGRDRRTEEENLRKKGEPHHELP

SEQ ID NO: 2341 - protein, 40 aa, Artificial Sequence
  Description of Artificial Sequence: Synthetic polypeptide
NLLGRNSFVVRVCACPGRDRRTEEENLRKKGEPHHELPPG

SEQ ID NO: 2342 - protein, 40 aa, Artificial Sequence
  Description of Artificial Sequence: Synthetic polypeptide
CMGGMNRRPILTIITLEDSSGNLLGRNSFEGRVCACPGRD

SEQ ID NO: 2343 - protein, 40 aa, Artificial Sequence
  Description of Artificial Sequence: Synthetic polypeptide
MGGMNRRPILTIITLEDSSGNLLGRNSFEMRVCACPGRDR

SEQ ID NO: 2344 - protein, 40 aa, Artificial Sequence
  Description of Artificial Sequence: Synthetic polypeptide
PILTIITLEDSSGNLLGRNSFEMRVCACPGRDRRTEEENL

SEQ ID NO: 2345 - protein, 40 aa, Artificial Sequence
  Description of Artificial Sequence: Synthetic polypeptide
IITLEDSSGNLLGRNSFEMRVCACPGRDRRTEEENLRKKG

SEQ ID NO: 2346 - protein, 40 aa, Artificial Sequence
  Description of Artificial Sequence: Synthetic polypeptide
NLLGRNSFEMRVCACPGRDRRTEEENLRKKGEPHHELPPG

SEQ ID NO: 2347 - protein, 40 aa, Artificial Sequence
  Description of Artificial Sequence: Synthetic polypeptide
GRNSFEMRVCACPGRDRRTEEENLRKKGEPHHELPPGSTK

SEQ ID NO: 2348 - protein, 40 aa, Artificial Sequence
  Description of Artificial Sequence: Synthetic polypeptide
CNSSCMGGMNRRPILTIITLEDSSGNLLGRNSFEVCVCAC

SEQ ID NO: 2349 - protein, 40 aa, Artificial Sequence
  Description of Artificial Sequence: Synthetic polypeptide
NSSCMGGMNRRPILTIITLEDSSGNLLGRNSFEVCVCACP

SEQ ID NO: 2350 - protein, 40 aa, Artificial Sequence
  Description of Artificial Sequence: Synthetic polypeptide
EVCVCACPGRDRRTEEENLRKKGEPHHELPPGSTKRALPN

SEQ ID NO: 2351 - protein, 40 aa, Artificial Sequence
  Description of Artificial Sequence: Synthetic polypeptide
MGGMNRRPILTIITLEDSSGNLLGRNSFEVHVCACPGRDR

SEQ ID NO: 2352 - protein, 40 aa, Artificial Sequence
  Description of Artificial Sequence: Synthetic polypeptide
ITLEDSSGNLLGRNSFEVHVCACPGRDRRTEEENLRKKGE

SEQ ID NO: 2353 - protein, 40 aa, Artificial Sequence
  Description of Artificial Sequence: Synthetic polypeptide
YMCNSSCMGGMNRRPILTIITLEDSSGNLLGRNSFEVRGC

SEQ ID NO: 2354 - protein, 40 aa, Artificial Sequence
  Description of Artificial Sequence: Synthetic polypeptide
GGMNRRPILTIITLEDSSGNLLGRNSFEVRGCACPGRDRR

SEQ ID NO: 2355 - protein, 40 aa, Artificial Sequence
  Description of Artificial Sequence: Synthetic polypeptide
GMNRRPILTIITLEDSSGNLLGRNSFEVRGCACPGRDRRT

SEQ ID NO: 2356 - protein, 40 aa, Artificial Sequence
  Description of Artificial Sequence: Synthetic polypeptide
LEDSSGNLLGRNSFEVRGCACPGRDRRTEEENLRKKGEPH

SEQ ID NO: 2357 - protein, 40 aa, Artificial Sequence
  Description of Artificial Sequence: Synthetic polypeptide
SFEVRGCACPGRDRRTEEENLRKKGEPHHELPPGSTKRAL

SEQ ID NO: 2358 - protein, 40 aa, Artificial Sequence
  Description of Artificial Sequence: Synthetic polypeptide
GCACPGRDRRTEEENLRKKGEPHHELPPGSTKRALPNNTS

SEQ ID NO: 2359 - protein, 40 aa, Artificial Sequence
  Description of Artificial Sequence: Synthetic polypeptide
YMCNSSCMGGMNRRPILTIITLEDSSGNLLGRNSFEVRLC

SEQ ID NO: 2360 - protein, 40 aa, Artificial Sequence
  Description of Artificial Sequence: Synthetic polypeptide
CNSSCMGGMNRRPILTIITLEDSSGNLLGRNSFEVRLCAC

SEQ ID NO: 2361 - protein, 40 aa, Artificial Sequence
  Description of Artificial Sequence: Synthetic polypeptide
SSCMGGMNRRPILTIITLEDSSGNLLGRNSFEVRLCACPG

SEQ ID NO: 2362 - protein, 40 aa, Artificial Sequence
  Description of Artificial Sequence: Synthetic polypeptide
CMGGMNRRPILTIITLEDSSGNLLGRNSFEVRLCACPGRD

SEQ ID NO: 2363 - protein, 40 aa, Artificial Sequence
  Description of Artificial Sequence: Synthetic polypeptide
LTIITLEDSSGNLLGRNSFEVRLCACPGRDRRTEEENLRK

SEQ ID NO: 2364 - protein, 40 aa, Artificial Sequence
  Description of Artificial Sequence: Synthetic polypeptide
DSSGNLLGRNSFEVRLCACPGRDRRTEEENLRKKGEPHHE

SEQ ID NO: 2365 - protein, 40 aa, Artificial Sequence
  Description of Artificial Sequence: Synthetic polypeptide
YMCNSSCMGGMNRRPILTIITLEDSSGNLLGRNSFEVRVG

SEQ ID NO: 2366 - protein, 40 aa, Artificial Sequence
  Description of Artificial Sequence: Synthetic polypeptide
SSCMGGMNRRPILTIITLEDSSGNLLGRNSFEVRVGACPG

SEQ ID NO: 2367 - protein, 40 aa, Artificial Sequence
  Description of Artificial Sequence: Synthetic polypeptide
GMNRRPILTIITLEDSSGNLLGRNSFEVRVGACPGRDRRT

SEQ ID NO: 2368 - protein, 40 aa, Artificial Sequence
  Description of Artificial Sequence: Synthetic polypeptide
SGNLLGRNSFEVRVGACPGRDRRTEEENLRKKGEPHHELP

SEQ ID NO: 2369 - protein, 40 aa, Artificial Sequence
  Description of Artificial Sequence: Synthetic polypeptide
NSSCMGGMNRRPILTIITLEDSSGNLLGRNSFEVRVYACP

SEQ ID NO: 2370 - protein, 40 aa, Artificial Sequence
  Description of Artificial Sequence: Synthetic polypeptide
MGGMNRRPILTIITLEDSSGNLLGRNSFEVRVYACPGRDR

SEQ ID NO: 2371 - protein, 40 aa, Artificial Sequence
  Description of Artificial Sequence: Synthetic polypeptide
TLEDSSGNLLGRNSFEVRVYACPGRDRRTEEENLRKKGEP

SEQ ID NO: 2372 - protein, 40 aa, Artificial Sequence
  Description of Artificial Sequence: Synthetic polypeptide
SSCMGGMNRRPILTIITLEDSSGNLLGRNSFEVRVCGCPG

SEQ ID NO: 2373 - protein, 40 aa, Artificial Sequence
  Description of Artificial Sequence: Synthetic polypeptide
GMNRRPILTIITLEDSSGNLLGRNSFEVRVCGCPGRDRRT

SEQ ID NO: 2374 - protein, 40 aa, Artificial Sequence
  Description of Artificial Sequence: Synthetic polypeptide
TIITLEDSSGNLLGRNSFEVRVCGCPGRDRRTEEENLRKK

SEQ ID NO: 2375 - protein, 40 aa, Artificial Sequence
  Description of Artificial Sequence: Synthetic polypeptide
ITLEDSSGNLLGRNSFEVRVCGCPGRDRRTEEENLRKKGE

SEQ ID NO: 2376 - protein, 40 aa, Artificial Sequence
  Description of Artificial Sequence: Synthetic polypeptide
NLLGRNSFEVRVCGCPGRDRRTEEENLRKKGEPHHELPPG

SEQ ID NO: 2377 - protein, 40 aa, Artificial Sequence
  Description of Artificial Sequence: Synthetic polypeptide
CGCPGRDRRTEEENLRKKGEPHHELPPGSTKRALPNNTSS

SEQ ID NO: 2378 - protein, 40 aa, Artificial Sequence
  Description of Artificial Sequence: Synthetic polypeptide
SCMGGMNRRPILTIITLEDSSGNLLGRNSFEVRVCPCPGR

SEQ ID NO: 2379 - protein, 40 aa, Artificial Sequence
  Description of Artificial Sequence: Synthetic polypeptide
CMGGMNRRPILTIITLEDSSGNLLGRNSFEVRVCPCPGRD

SEQ ID NO: 2380 - protein, 40 aa, Artificial Sequence
  Description of Artificial Sequence: Synthetic polypeptide
MNRRPILTIITLEDSSGNLLGRNSFEVRVCPCPGRDRRTE

SEQ ID NO: 2381 - protein, 40 aa, Artificial Sequence
  Description of Artificial Sequence: Synthetic polypeptide
GRNSFEVRVCPCPGRDRRTEEENLRKKGEPHHELPPGSTK

SEQ ID NO: 2382 - protein, 40 aa, Artificial Sequence
  Description of Artificial Sequence: Synthetic polypeptide
MNRRPILTIITLEDSSGNLLGRNSFEVRVCAGPGRDRRTE

SEQ ID NO: 2383 - protein, 40 aa, Artificial Sequence
  Description of Artificial Sequence: Synthetic polypeptide
GNLLGRNSFEVRVCAGPGRDRRTEEENLRKKGEPHHELPP

SEQ ID NO: 2384 - protein, 40 aa, Artificial Sequence
  Description of Artificial Sequence: Synthetic polypeptide
NSSCMGGMNRRPILTIITLEDSSGNLLGRNSFEVRVCAYP

SEQ ID NO: 2385 - protein, 40 aa, Artificial Sequence
  Description of Artificial Sequence: Synthetic polypeptide
SSCMGGMNRRPILTIITLEDSSGNLLGRNSFEVRVCAYPG

SEQ ID NO: 2386 - protein, 40 aa, Artificial Sequence
  Description of Artificial Sequence: Synthetic polypeptide
GGMNRRPILTIITLEDSSGNLLGRNSFEVRVCAYPGRDRR

SEQ ID NO: 2387 - protein, 40 aa, Artificial Sequence
  Description of Artificial Sequence: Synthetic polypeptide
GMNRRPILTIITLEDSSGNLLGRNSFEVRVCAYPGRDRRT

SEQ ID NO: 2388 - protein, 40 aa, Artificial Sequence
  Description of Artificial Sequence: Synthetic polypeptide
SSGNLLGRNSFEVRVCAYPGRDRRTEEENLRKKGEPHHEL

SEQ ID NO: 2389 - protein, 40 aa, Artificial Sequence
  Description of Artificial Sequence: Synthetic polypeptide
CMGGMNRRPILTIITLEDSSGNLLGRNSFEVRVCACRGRD

SEQ ID NO: 2390 - protein, 40 aa, Artificial Sequence
  Description of Artificial Sequence: Synthetic polypeptide
LTIITLEDSSGNLLGRNSFEVRVCACRGRDRRTEEENLRK

SEQ ID NO: 2391 - protein, 40 aa, Artificial Sequence
  Description of Artificial Sequence: Synthetic polypeptide
TIITLEDSSGNLLGRNSFEVRVCACRGRDRRTEEENLRKK

SEQ ID NO: 2392 - protein, 40 aa, Artificial Sequence
  Description of Artificial Sequence: Synthetic polypeptide
LEDSSGNLLGRNSFEVRVCACRGRDRRTEEENLRKKGEPH

SEQ ID NO: 2393 - protein, 40 aa, Artificial Sequence
  Description of Artificial Sequence: Synthetic polypeptide
DSSGNLLGRNSFEVRVCACRGRDRRTEEENLRKKGEPHHE

SEQ ID NO: 2394 - protein, 40 aa, Artificial Sequence
  Description of Artificial Sequence: Synthetic polypeptide
SSCMGGMNRRPILTIITLEDSSGNLLGRNSFEVRVCACSG

SEQ ID NO: 2395 - protein, 40 aa, Artificial Sequence
  Description of Artificial Sequence: Synthetic polypeptide
GMNRRPILTIITLEDSSGNLLGRNSFEVRVCACSGRDRRT

SEQ ID NO: 2396 - protein, 40 aa, Artificial Sequence
  Description of Artificial Sequence: Synthetic polypeptide
MNRRPILTIITLEDSSGNLLGRNSFEVRVCACSGRDRRTE

SEQ ID NO: 2397 - protein, 40 aa, Artificial Sequence
  Description of Artificial Sequence: Synthetic polypeptide
ILTIITLEDSSGNLLGRNSFEVRVCACSGRDRRTEEENLR

SEQ ID NO: 2398 - protein, 40 aa, Artificial Sequence
  Description of Artificial Sequence: Synthetic polypeptide
EDSSGNLLGRNSFEVRVCACSGRDRRTEEENLRKKGEPHH

SEQ ID NO: 2399 - protein, 40 aa, Artificial Sequence
  Description of Artificial Sequence: Synthetic polypeptide
SGNLLGRNSFEVRVCACSGRDRRTEEENLRKKGEPHHELP

SEQ ID NO: 2400 - protein, 40 aa, Artificial Sequence
  Description of Artificial Sequence: Synthetic polypeptide
NLLGRNSFEVRVCACSGRDRRTEEENLRKKGEPHHELPPG

SEQ ID NO: 2401 - protein, 40 aa, Artificial Sequence
  Description of Artificial Sequence: Synthetic polypeptide
CSGRDRRTEEENLRKKGEPHHELPPGSTKRALPNNTSSSP

SEQ ID NO: 2402 - protein, 40 aa, Artificial Sequence
  Description of Artificial Sequence: Synthetic polypeptide
SSCMGGMNRRPILTIITLEDSSGNLLGRNSFEVRVCACPE

SEQ ID NO: 2403 - protein, 40 aa, Artificial Sequence
  Description of Artificial Sequence: Synthetic polypeptide
CMGGMNRRPILTIITLEDSSGNLLGRNSFEVRVCACPERD

SEQ ID NO: 2404 - protein, 40 aa, Artificial Sequence
  Description of Artificial Sequence: Synthetic polypeptide
MGGMNRRPILTIITLEDSSGNLLGRNSFEVRVCACPERDR

SEQ ID NO: 2405 - protein, 40 aa, Artificial Sequence
  Description of Artificial Sequence: Synthetic polypeptide
GGMNRRPILTIITLEDSSGNLLGRNSFEVRVCACPERDRR

SEQ ID NO: 2406 - protein, 40 aa, Artificial Sequence
  Description of Artificial Sequence: Synthetic polypeptide
RPILTIITLEDSSGNLLGRNSFEVRVCACPERDRRTEEEN

SEQ ID NO: 2407 - protein, 40 aa, Artificial Sequence
  Description of Artificial Sequence: Synthetic polypeptide
IITLEDSSGNLLGRNSFEVRVCACPERDRRTEEENLRKKG

SEQ ID NO: 2408 - protein, 40 aa, Artificial Sequence
  Description of Artificial Sequence: Synthetic polypeptide
TLEDSSGNLLGRNSFEVRVCACPERDRRTEEENLRKKGEP

SEQ ID NO: 2409 - protein, 40 aa, Artificial Sequence
  Description of Artificial Sequence: Synthetic polypeptide
SGNLLGRNSFEVRVCACPERDRRTEEENLRKKGEPHHELP

SEQ ID NO: 2410 - protein, 40 aa, Artificial Sequence
  Description of Artificial Sequence: Synthetic polypeptide
PERDRRTEEENLRKKGEPHHELPPGSTKRALPNNTSSSPQ

SEQ ID NO: 2411 - protein, 40 aa, Artificial Sequence
  Description of Artificial Sequence: Synthetic polypeptide
CMGGMNRRPILTIITLEDSSGNLLGRNSFEVRVCACPRRD

SEQ ID NO: 2412 - protein, 40 aa, Artificial Sequence
  Description of Artificial Sequence: Synthetic polypeptide
MGGMNRRPILTIITLEDSSGNLLGRNSFEVRVCACPRRDR

SEQ ID NO: 2413 - protein, 40 aa, Artificial Sequence
  Description of Artificial Sequence: Synthetic polypeptide
SCMGGMNRRPILTIITLEDSSGNLLGRNSFEVRVCACPGK

SEQ ID NO: 2414 - protein, 40 aa, Artificial Sequence
  Description of Artificial Sequence: Synthetic polypeptide
CMGGMNRRPILTIITLEDSSGNLLGRNSFEVRVCACPGKD

SEQ ID NO: 2415 - protein, 40 aa, Artificial Sequence
  Description of Artificial Sequence: Synthetic polypeptide
IITLEDSSGNLLGRNSFEVRVCACPGKDRRTEEENLRKKG

SEQ ID NO: 2416 - protein, 40 aa, Artificial Sequence
  Description of Artificial Sequence: Synthetic polypeptide
SGNLLGRNSFEVRVCACPGKDRRTEEENLRKKGEPHHELP

SEQ ID NO: 2417 - protein, 40 aa, Artificial Sequence
  Description of Artificial Sequence: Synthetic polypeptide
GNLLGRNSFEVRVCACPGKDRRTEEENLRKKGEPHHELPP

SEQ ID NO: 2418 - protein, 40 aa, Artificial Sequence
  Description of Artificial Sequence: Synthetic polypeptide
MNRRPILTIITLEDSSGNLLGRNSFEVRVCACPGSDRRTE

SEQ ID NO: 2419 - protein, 40 aa, Artificial Sequence
  Description of Artificial Sequence: Synthetic polypeptide
LEDSSGNLLGRNSFEVRVCACPGSDRRTEEENLRKKGEPH

SEQ ID NO: 2420 - protein, 40 aa, Artificial Sequence
  Description of Artificial Sequence: Synthetic polypeptide
NLLGRNSFEVRVCACPGSDRRTEEENLRKKGEPHHELPPG

SEQ ID NO: 2421 - protein, 40 aa, Artificial Sequence
  Description of Artificial Sequence: Synthetic polypeptide
GRNSFEVRVCACPGSDRRTEEENLRKKGEPHHELPPGSTK

SEQ ID NO: 2422 - protein, 40 aa, Artificial Sequence
  Description of Artificial Sequence: Synthetic polypeptide
FEVRVCACPGSDRRTEEENLRKKGEPHHELPPGSTKRALP

SEQ ID NO: 2423 - protein, 40 aa, Artificial Sequence
  Description of Artificial Sequence: Synthetic polypeptide
CMGGMNRRPILTIITLEDSSGNLLGRNSFEVRVCACPGRE

SEQ ID NO: 2424 - protein, 40 aa, Artificial Sequence
  Description of Artificial Sequence: Synthetic polypeptide
MNRRPILTIITLEDSSGNLLGRNSFEVRVCACPGRERRTE

SEQ ID NO: 2425 - protein, 40 aa, Artificial Sequence
  Description of Artificial Sequence: Synthetic polypeptide
SSGNLLGRNSFEVRVCACPGRERRTEEENLRKKGEPHHEL

SEQ ID NO: 2426 - protein, 40 aa, Artificial Sequence
  Description of Artificial Sequence: Synthetic polypeptide
SFEVRVCACPGRERRTEEENLRKKGEPHHELPPGSTKRAL

SEQ ID NO: 2427 - protein, 40 aa, Artificial Sequence
  Description of Artificial Sequence: Synthetic polypeptide
LEDSSGNLLGRNSFEVRVCACPGRHRRTEEENLRKKGEPH

SEQ ID NO: 2428 - protein, 40 aa, Artificial Sequence
  Description of Artificial Sequence: Synthetic polypeptide
GNLLGRNSFEVRVCACPGRHRRTEEENLRKKGEPHHELPP

SEQ ID NO: 2429 - protein, 40 aa, Artificial Sequence
  Description of Artificial Sequence: Synthetic polypeptide
TIITLEDSSGNLLGRNSFEVRVCACPGRDQRTEEENLRKK

SEQ ID NO: 2430 - protein, 40 aa, Artificial Sequence
  Description of Artificial Sequence: Synthetic polypeptide
ITLEDSSGNLLGRNSFEVRVCACPGRDQRTEEENLRKKGE

SEQ ID NO: 2431 - protein, 40 aa, Artificial Sequence
  Description of Artificial Sequence: Synthetic polypeptide
DSSGNLLGRNSFEVRVCACPGRDQRTEEENLRKKGEPHHE

SEQ ID NO: 2432 - protein, 40 aa, Artificial Sequence
  Description of Artificial Sequence: Synthetic polypeptide
NLLGRNSFEVRVCACPGRDQRTEEENLRKKGEPHHELPPG

SEQ ID NO: 2433 - protein, 40 aa, Artificial Sequence
  Description of Artificial Sequence: Synthetic polypeptide
NRRPILTIITLEDSSGNLLGRNSFEVRVCACPGRDWRTEE

SEQ ID NO: 2434 - protein, 40 aa, Artificial Sequence
  Description of Artificial Sequence: Synthetic polypeptide
RRPILTIITLEDSSGNLLGRNSFEVRVCACPGRDWRTEEE

SEQ ID NO: 2435 - protein, 40 aa, Artificial Sequence
  Description of Artificial Sequence: Synthetic polypeptide
RNSFEVRVCACPGRDWRTEEENLRKKGEPHHELPPGSTKR

SEQ ID NO: 2436 - protein, 40 aa, Artificial Sequence
  Description of Artificial Sequence: Synthetic polypeptide
NRRPILTIITLEDSSGNLLGRNSFEVRVCACPGRDRPTEE

SEQ ID NO: 2437 - protein, 40 aa, Artificial Sequence
  Description of Artificial Sequence: Synthetic polypeptide
NLLGRNSFEVRVCACPGRDRPTEEENLRKKGEPHHELPPG

SEQ ID NO: 2438 - protein, 40 aa, Artificial Sequence
  Description of Artificial Sequence: Synthetic polypeptide
LGRNSFEVRVCACPGRDRPTEEENLRKKGEPHHELPPGST

SEQ ID NO: 2439 - protein, 40 aa, Artificial Sequence
  Description of Artificial Sequence: Synthetic polypeptide
GRNSFEVRVCACPGRDRPTEEENLRKKGEPHHELPPGSTK

SEQ ID NO: 2440 - protein, 40 aa, Artificial Sequence
  Description of Artificial Sequence: Synthetic polypeptide
NSFEVRVCACPGRDRPTEEENLRKKGEPHHELPPGSTKRA

SEQ ID NO: 2441 - protein, 40 aa, Artificial Sequence
  Description of Artificial Sequence: Synthetic polypeptide
RDRPTEEENLRKKGEPHHELPPGSTKRALPNNTSSSPQPK

SEQ ID NO: 2442 - protein, 40 aa, Artificial Sequence
  Description of Artificial Sequence: Synthetic polypeptide
NRRPILTIITLEDSSGNLLGRNSFEVRVCACPGRDRRPEE

SEQ ID NO: 2443 - protein, 40 aa, Artificial Sequence
  Description of Artificial Sequence: Synthetic polypeptide
LTIITLEDSSGNLLGRNSFEVRVCACPGRDRRPEEENLRK

SEQ ID NO: 2444 - protein, 40 aa, Artificial Sequence
  Description of Artificial Sequence: Synthetic polypeptide
EDSSGNLLGRNSFEVRVCACPGRDRRPEEENLRKKGEPHH

SEQ ID NO: 2445 - protein, 40 aa, Artificial Sequence
  Description of Artificial Sequence: Synthetic polypeptide
GNLLGRNSFEVRVCACPGRDRRPEEENLRKKGEPHHELPP

SEQ ID NO: 2446 - protein, 40 aa, Artificial Sequence
  Description of Artificial Sequence: Synthetic polypeptide
SFEVRVCACPGRDRRPEEENLRKKGEPHHELPPGSTKRAL

SEQ ID NO: 2447 - protein, 40 aa, Artificial Sequence
  Description of Artificial Sequence: Synthetic polypeptide
ILTIITLEDSSGNLLGRNSFEVRVCACPGRDRRTKEENLR

SEQ ID NO: 2448 - protein, 40 aa, Artificial Sequence
  Description of Artificial Sequence: Synthetic polypeptide
LEDSSGNLLGRNSFEVRVCACPGRDRRTKEENLRKKGEPH

SEQ ID NO: 2449 - protein, 40 aa, Artificial Sequence
  Description of Artificial Sequence: Synthetic polypeptide
MNRRPILTIITLEDSSGNLLGRNSFEVRVCACPGRDRRTV

SEQ ID NO: 2450 - protein, 40 aa, Artificial Sequence
  Description of Artificial Sequence: Synthetic polypeptide
NRRPILTIITLEDSSGNLLGRNSFEVRVCACPGRDRRTVE

SEQ ID NO: 2451 - protein, 40 aa, Artificial Sequence
  Description of Artificial Sequence: Synthetic polypeptide
LTIITLEDSSGNLLGRNSFEVRVCACPGRDRRTVEENLRK

SEQ ID NO: 2452 - protein, 40 aa, Artificial Sequence
  Description of Artificial Sequence: Synthetic polypeptide
ITLEDSSGNLLGRNSFEVRVCACPGRDRRTVEENLRKKGE

SEQ ID NO: 2453 - protein, 40 aa, Artificial Sequence
  Description of Artificial Sequence: Synthetic polypeptide
NLLGRNSFEVRVCACPGRDRRTVEENLRKKGEPHHELPPG

SEQ ID NO: 2454 - protein, 40 aa, Artificial Sequence
  Description of Artificial Sequence: Synthetic polypeptide
RPILTIITLEDSSGNLLGRNSFEVRVCACPGRDRRTEGEN

SEQ ID NO: 2455 - protein, 40 aa, Artificial Sequence
  Description of Artificial Sequence: Synthetic polypeptide
SSGNLLGRNSFEVRVCACPGRDRRTEGENLRKKGEPHHEL

SEQ ID NO: 2456 - protein, 40 aa, Artificial Sequence
  Description of Artificial Sequence: Synthetic polypeptide
NRRPILTIITLEDSSGNLLGRNSFEVRVCACPGRDRRTEQ

SEQ ID NO: 2457 - protein, 40 aa, Artificial Sequence
  Description of Artificial Sequence: Synthetic polypeptide
RRPILTIITLEDSSGNLLGRNSFEVRVCACPGRDRRTEQE

SEQ ID NO: 2458 - protein, 40 aa, Artificial Sequence
  Description of Artificial Sequence: Synthetic polypeptide
IITLEDSSGNLLGRNSFEVRVCACPGRDRRTEQENLRKKG

SEQ ID NO: 2459 - protein, 40 aa, Artificial Sequence
  Description of Artificial Sequence: Synthetic polypeptide
ITLEDSSGNLLGRNSFEVRVCACPGRDRRTEQENLRKKGE

SEQ ID NO: 2460 - protein, 40 aa, Artificial Sequence
  Description of Artificial Sequence: Synthetic polypeptide
NLLGRNSFEVRVCACPGRDRRTEQENLRKKGEPHHELPPG

SEQ ID NO: 2461 - protein, 40 aa, Artificial Sequence
  Description of Artificial Sequence: Synthetic polypeptide
ALPNNTSSSPQPKKKPLDGEYFTLQFRGRERFEMFRELNE

SEQ ID NO: 2462 - protein, 40 aa, Artificial Sequence
  Description of Artificial Sequence: Synthetic polypeptide
FTLQFRGRERFEMFRELNEALELKDAQAGKEPGGSRAHSS

SEQ ID NO: 2463 - protein, 40 aa, Artificial Sequence
  Description of Artificial Sequence: Synthetic polypeptide
TSSSPQPKKKPLDGEYFTLQIRVRERFEMFRELNEALELK

SEQ ID NO: 2464 - protein, 40 aa, Artificial Sequence
  Description of Artificial Sequence: Synthetic polypeptide
PQPKKKPLDGEYFTLQIRVRERFEMFRELNEALELKDAQA

SEQ ID NO: 2465 - protein, 40 aa, Artificial Sequence
  Description of Artificial Sequence: Synthetic polypeptide
LDGEYFTLQIRVRERFEMFRELNEALELKDAQAGKEPGGS

SEQ ID NO: 2466 - protein, 40 aa, Artificial Sequence
  Description of Artificial Sequence: Synthetic polypeptide
DGEYFTLQIRVRERFEMFRELNEALELKDAQAGKEPGGSR

SEQ ID NO: 2467 - protein, 40 aa, Artificial Sequence
  Description of Artificial Sequence: Synthetic polypeptide
LQIRVRERFEMFRELNEALELKDAQAGKEPGGSRAHSSHL

SEQ ID NO: 2468 - protein, 40 aa, Artificial Sequence
  Description of Artificial Sequence: Synthetic polypeptide
NTSSSPQPKKKPLDGEYFTLQIRWRERFEMFRELNEALEL

SEQ ID NO: 2469 - protein, 40 aa, Artificial Sequence
  Description of Artificial Sequence: Synthetic polypeptide
SPQPKKKPLDGEYFTLQIRWRERFEMFRELNEALELKDAQ

SEQ ID NO: 2470 - protein, 40 aa, Artificial Sequence
  Description of Artificial Sequence: Synthetic polypeptide
KPLDGEYFTLQIRWRERFEMFRELNEALELKDAQAGKEPG

SEQ ID NO: 2471 - protein, 40 aa, Artificial Sequence
  Description of Artificial Sequence: Synthetic polypeptide
DGEYFTLQIRWRERFEMFRELNEALELKDAQAGKEPGGSR

SEQ ID NO: 2472 - protein, 40 aa, Artificial Sequence
  Description of Artificial Sequence: Synthetic polypeptide
ALPNNTSSSPQPKKKPLDGEYFTLQIRGREHFEMFRELNE

SEQ ID NO: 2473 - protein, 40 aa, Artificial Sequence
  Description of Artificial Sequence: Synthetic polypeptide
DGEYFTLQIRGREHFEMFRELNEALELKDAQAGKEPGGSR

SEQ ID NO: 2474 - protein, 40 aa, Artificial Sequence
  Description of Artificial Sequence: Synthetic polypeptide
GEYFTLQIRGRESFEMFRELNEALELKDAQAGKEPGGSRA

SEQ ID NO: 2475 - protein, 40 aa, Artificial Sequence
  Description of Artificial Sequence: Synthetic polypeptide
FTLQIRGRESFEMFRELNEALELKDAQAGKEPGGSRAHSS

SEQ ID NO: 2476 - protein, 40 aa, Artificial Sequence
  Description of Artificial Sequence: Synthetic polypeptide
TSSSPQPKKKPLDGEYFTLQIRGRERFEMFRELNEAFELK

SEQ ID NO: 2477 - protein, 40 aa, Artificial Sequence
  Description of Artificial Sequence: Synthetic polypeptide
PKKKPLDGEYFTLQIRGRERFEMFRELNEAFELKDAQAGK

SEQ ID NO: 2478 - protein, 40 aa, Artificial Sequence
  Description of Artificial Sequence: Synthetic polypeptide
TLQIRGRERFEMFRELNEAFELKDAQAGKEPGGSRAHSSH

SEQ ID NO: 2479 - protein, 40 aa, Artificial Sequence
  Description of Artificial Sequence: Synthetic polypeptide
NNTSSSPQPKKKPLDGEYFTLQIRGRERFEMFRELNEASE

SEQ ID NO: 2480 - protein, 40 aa, Artificial Sequence
  Description of Artificial Sequence: Synthetic polypeptide
LDGEYFTLQIRGRERFEMFRELNEASELKDAQAGKEPGGS

SEQ ID NO: 2481 - protein, 40 aa, Artificial Sequence
  Description of Artificial Sequence: Synthetic polypeptide
TLQIRGRERFEMFRELNEASELKDAQAGKEPGGSRAHSSH

SEQ ID NO: 2482 - protein, 40 aa, Artificial Sequence
  Description of Artificial Sequence: Synthetic polypeptide
IRGRERFEMFRELNEASELKDAQAGKEPGGSRAHSSHLKS

SEQ ID NO: 2483 - protein, 40 aa, Artificial Sequence
  Description of Artificial Sequence: Synthetic polypeptide
SPRVVLPVWLNFDGEPQPYPTLPPGTGRRIHSYRGNLWLF

SEQ ID NO: 2484 - protein, 40 aa, Artificial Sequence
  Description of Artificial Sequence: Synthetic polypeptide
LNFDGEPQPYPTLPPGTGRRIHSYRGNLWLFRDAGTHDGL

SEQ ID NO: 2485 - protein, 40 aa, Artificial Sequence
  Description of Artificial Sequence: Synthetic polypeptide
DGEPQPYPTLPPGTGRRIHSYRGNLWLFRDAGTHDGLLVN

SEQ ID NO: 2486 - protein, 40 aa, Artificial Sequence
  Description of Artificial Sequence: Synthetic polypeptide
PYPTLPPGTGRRIHSYRGNLWLFRDAGTHDGLLVNQTELF

SEQ ID NO: 2487 - protein, 40 aa, Artificial Sequence
  Description of Artificial Sequence: Synthetic polypeptide
GTGRRIHSYRGNLWLFRDAGTHDGLLVNQTELFVPSLNVD

SEQ ID NO: 2488 - protein, 40 aa, Artificial Sequence
  Description of Artificial Sequence: Synthetic polypeptide
TGRRIHSYRGNLWLFRDAGTHDGLLVNQTELFVPSLNVDG

SEQ ID NO: 2489 - protein, 40 aa, Artificial Sequence
  Description of Artificial Sequence: Synthetic polypeptide
IHSYRGNLWLFRDAGTHDGLLVNQTELFVPSLNVDGQPIF

SEQ ID NO: 2490 - protein, 40 aa, Artificial Sequence
  Description of Artificial Sequence: Synthetic polypeptide
SYRGNLWLFRDAGTHDGLLVNQTELFVPSLNVDGQPIFAN

SEQ ID NO: 2491 - protein, 40 aa, Artificial Sequence
  Description of Artificial Sequence: Synthetic polypeptide
GNLWLFRDAGTHDGLLVNQTELFVPSLNVDGQPIFANITL

SEQ ID NO: 2492 - protein, 40 aa, Artificial Sequence
  Description of Artificial Sequence: Synthetic polypeptide
VVLPVWLNFDGEPQPYPTLPPGTGRRIHSYRGHLCLFRDA

SEQ ID NO: 2493 - protein, 40 aa, Artificial Sequence
  Description of Artificial Sequence: Synthetic polypeptide
PTLPPGTGRRIHSYRGHLCLFRDAGTHDGLLVNQTELFVP

SEQ ID NO: 2494 - protein, 40 aa, Artificial Sequence
  Description of Artificial Sequence: Synthetic polypeptide
LPPGTGRRIHSYRGHLCLFRDAGTHDGLLVNQTELFVPSL

SEQ ID NO: 2495 - protein, 40 aa, Artificial Sequence
  Description of Artificial Sequence: Synthetic polypeptide
YRGHLCLFRDAGTHDGLLVNQTELFVPSLNVDGQPIFANI

SEQ ID NO: 2496 - protein, 40 aa, Artificial Sequence
  Description of Artificial Sequence: Synthetic polypeptide
DGEPQPYPTLPPGTGRRIHSYRGHLWPFRDAGTHDGLLVN

SEQ ID NO: 2497 - protein, 40 aa, Artificial Sequence
  Description of Artificial Sequence: Synthetic polypeptide
EPQPYPTLPPGTGRRIHSYRGHLWPFRDAGTHDGLLVNQT

SEQ ID NO: 2498 - protein, 40 aa, Artificial Sequence
  Description of Artificial Sequence: Synthetic polypeptide
GHLWPFRDAGTHDGLLVNQTELFVPSLNVDGQPIFANITL

SEQ ID NO: 2499 - protein, 40 aa, Artificial Sequence
  Description of Artificial Sequence: Synthetic polypeptide
PFRDAGTHDGLLVNQTELFVPSLNVDGQPIFANITLPVYT

SEQ ID NO: 2500 - protein, 40 aa, Artificial Sequence
  Description of Artificial Sequence: Synthetic polypeptide
RGHLWLFGDAGTHDGLLVNQTELFVPSLNVDGQPIFANIT

SEQ ID NO: 2501 - protein, 40 aa, Artificial Sequence
  Description of Artificial Sequence: Synthetic polypeptide
LWLFGDAGTHDGLLVNQTELFVPSLNVDGQPIFANITLPV

SEQ ID NO: 2502 - protein, 40 aa, Artificial Sequence
  Description of Artificial Sequence: Synthetic polypeptide
FGDAGTHDGLLVNQTELFVPSLNVDGQPIFANITLPVYTL

SEQ ID NO: 2503 - protein, 40 aa, Artificial Sequence
  Description of Artificial Sequence: Synthetic polypeptide
FDGEPQPYPTLPPGTGRRIHSYRGHLWLFRDAGTHDGHLV

SEQ ID NO: 2504 - protein, 40 aa, Artificial Sequence
  Description of Artificial Sequence: Synthetic polypeptide
SYRGHLWLFRDAGTHDGHLVNQTELFVPSLNVDGQPIFAN

SEQ ID NO: 2505 - protein, 40 aa, Artificial Sequence
  Description of Artificial Sequence: Synthetic polypeptide
DAGTHDGHLVNQTELFVPSLNVDGQPIFANITLPVYTLKE

SEQ ID NO: 2506 - protein, 40 aa, Artificial Sequence
  Description of Artificial Sequence: Synthetic polypeptide
PTLPPGTGRRIHSYRGHLWLFRDAGTHDGLLDNQTELFVP

SEQ ID NO: 2507 - protein, 40 aa, Artificial Sequence
  Description of Artificial Sequence: Synthetic polypeptide
LPPGTGRRIHSYRGHLWLFRDAGTHDGLLFNQTELFVPSL

SEQ ID NO: 2508 - protein, 40 aa, Artificial Sequence
  Description of Artificial Sequence: Synthetic polypeptide
RGHLWLFRDAGTHDGLLFNQTELFVPSLNVDGQPIFANIT

SEQ ID NO: 2509 - protein, 40 aa, Artificial Sequence
  Description of Artificial Sequence: Synthetic polypeptide
GHLWLFRDAGTHDGLLFNQTELFVPSLNVDGQPIFANITL

SEQ ID NO: 2510 - protein, 40 aa, Artificial Sequence
  Description of Artificial Sequence: Synthetic polypeptide
WLFRDAGTHDGLLFNQTELFVPSLNVDGQPIFANITLPVY

SEQ ID NO: 2511 - protein, 40 aa, Artificial Sequence
  Description of Artificial Sequence: Synthetic polypeptide
PQPYPTLPPGTGRRIHSYRGHLWLFRDAGTHDGLLVYQTE

SEQ ID NO: 2512 - protein, 40 aa, Artificial Sequence
  Description of Artificial Sequence: Synthetic polypeptide
FRDAGTHDGLLVYQTELFVPSLNVDGQPIFANITLPVYTL

SEQ ID NO: 2513 - protein, 40 aa, Artificial Sequence
  Description of Artificial Sequence: Synthetic polypeptide
RDAGTHDGLLVYQTELFVPSLNVDGQPIFANITLPVYTLK

SEQ ID NO: 2514 - protein, 40 aa, Artificial Sequence
  Description of Artificial Sequence: Synthetic polypeptide
RIHSYRGHLWLFRDAGTHDGLLVNQTELVVPSLNVDGQPI

SEQ ID NO: 2515 - protein, 40 aa, Artificial Sequence
  Description of Artificial Sequence: Synthetic polypeptide
FRDAGTHDGLLVNQTELVVPSLNVDGQPIFANITLPVYTL

SEQ ID NO: 2516 - protein, 40 aa, Artificial Sequence
  Description of Artificial Sequence: Synthetic polypeptide
GLLVNQTELVVPSLNVDGQPIFANITLPVYTLKERCLQVV

SEQ ID NO: 2517 - protein, 40 aa, Artificial Sequence
  Description of Artificial Sequence: Synthetic polypeptide
QTELVVPSLNVDGQPIFANITLPVYTLKERCLQVVRSLVK

SEQ ID NO: 2518 - protein, 40 aa, Artificial Sequence
  Description of Artificial Sequence: Synthetic polypeptide
QTELFVPSLNVDGQPIFANFTLPVYTLKERCLQVVRSLVK

SEQ ID NO: 2519 - protein, 40 aa, Artificial Sequence
  Description of Artificial Sequence: Synthetic polypeptide
VPSLNVDGQPIFANFTLPVYTLKERCLQVVRSLVKPENYR

SEQ ID NO: 2520 - protein, 40 aa, Artificial Sequence
  Description of Artificial Sequence: Synthetic polypeptide
NVDGQPIFANFTLPVYTLKERCLQVVRSLVKPENYRRLDI

SEQ ID NO: 2521 - protein, 40 aa, Artificial Sequence
  Description of Artificial Sequence: Synthetic polypeptide
FTLPVYTLKERCLQVVRSLVKPENYRRLDIVRSLYEDLED

SEQ ID NO: 2522 - protein, 40 aa, Artificial Sequence
  Description of Artificial Sequence: Synthetic polypeptide
RGHLWLFRDAGTHDGLLVNQTELFVPSLNVDGQPIFANNT

SEQ ID NO: 2523 - protein, 40 aa, Artificial Sequence
  Description of Artificial Sequence: Synthetic polypeptide
FRDAGTHDGLLVNQTELFVPSLNVDGQPIFANNTLPVYTL

SEQ ID NO: 2524 - protein, 40 aa, Artificial Sequence
  Description of Artificial Sequence: Synthetic polypeptide
AGTHDGLLVNQTELFVPSLNVDGQPIFANNTLPVYTLKER

SEQ ID NO: 2525 - protein, 40 aa, Artificial Sequence
  Description of Artificial Sequence: Synthetic polypeptide
QTELFVPSLNVDGQPIFANNTLPVYTLKERCLQVVRSLVK

SEQ ID NO: 2526 - protein, 40 aa, Artificial Sequence
  Description of Artificial Sequence: Synthetic polypeptide
ELFVPSLNVDGQPIFANNTLPVYTLKERCLQVVRSLVKPE

SEQ ID NO: 2527 - protein, 40 aa, Artificial Sequence
  Description of Artificial Sequence: Synthetic polypeptide
FVPSLNVDGQPIFANNTLPVYTLKERCLQVVRSLVKPENY

SEQ ID NO: 2528 - protein, 40 aa, Artificial Sequence
  Description of Artificial Sequence: Synthetic polypeptide
LFRDAGTHDGLLVNQTELFVPSLNVDGQPIFANITPPVYT

SEQ ID NO: 2529 - protein, 40 aa, Artificial Sequence
  Description of Artificial Sequence: Synthetic polypeptide
SLNVDGQPIFANITPPVYTLKERCLQVVRSLVKPENYRRL

SEQ ID NO: 2530 - protein, 40 aa, Artificial Sequence
  Description of Artificial Sequence: Synthetic polypeptide
FRDAGTHDGLLVNQTELFVPSLNVDGQPIFANITLPVYTR

SEQ ID NO: 2531 - protein, 40 aa, Artificial Sequence
  Description of Artificial Sequence: Synthetic polypeptide
FANITLPVYTRKERCLQVVRSLVKPENYRRLDIVRSLYED

SEQ ID NO: 2532 - protein, 40 aa, Artificial Sequence
  Description of Artificial Sequence: Synthetic polypeptide
NITLPVYTRKERCLQVVRSLVKPENYRRLDIVRSLYEDLE

SEQ ID NO: 2533 - protein, 40 aa, Artificial Sequence
  Description of Artificial Sequence: Synthetic polypeptide
RDAGTHDGLLVNQTELFVPSLNVDGQPIFANITLPVYTVK

SEQ ID NO: 2534 - protein, 40 aa, Artificial Sequence
  Description of Artificial Sequence: Synthetic polypeptide
TELFVPSLNVDGQPIFANITLPVYTVKERCLQVVRSLVKP

SEQ ID NO: 2535 - protein, 40 aa, Artificial Sequence
  Description of Artificial Sequence: Synthetic polypeptide
FVPSLNVDGQPIFANITLPVYTVKERCLQVVRSLVKPENY

SEQ ID NO: 2536 - protein, 40 aa, Artificial Sequence
  Description of Artificial Sequence: Synthetic polypeptide
VPSLNVDGQPIFANITLPVYTVKERCLQVVRSLVKPENYR

SEQ ID NO: 2537 - protein, 40 aa, Artificial Sequence
  Description of Artificial Sequence: Synthetic polypeptide
IFANITLPVYTVKERCLQVVRSLVKPENYRRLDIVRSLYE

SEQ ID NO: 2538 - protein, 40 aa, Artificial Sequence
  Description of Artificial Sequence: Synthetic polypeptide
TLPVYTVKERCLQVVRSLVKPENYRRLDIVRSLYEDLEDH

SEQ ID NO: 2539 - protein, 40 aa, Artificial Sequence
  Description of Artificial Sequence: Synthetic polypeptide
VDGQPIFANITLPVYTLKEQCLQVVRSLVKPENYRRLDIV

SEQ ID NO: 2540 - protein, 40 aa, Artificial Sequence
  Description of Artificial Sequence: Synthetic polypeptide
RLQVVRSLVKPENYRRLDIVRSLYEDLEDHPNVQKDLERL

SEQ ID NO: 2541 - protein, 40 aa, Artificial Sequence
  Description of Artificial Sequence: Synthetic polypeptide
KERCLQDVRSLVKPENYRRLDIVRSLYEDLEDHPNVQKDL

SEQ ID NO: 2542 - protein, 40 aa, Artificial Sequence
  Description of Artificial Sequence: Synthetic polypeptide
RCLQDVRSLVKPENYRRLDIVRSLYEDLEDHPNVQKDLER

SEQ ID NO: 2543 - protein, 40 aa, Artificial Sequence
  Description of Artificial Sequence: Synthetic polypeptide
NVDGQPIFANITLPVYTLKERCLQVVRSLVKPENYRRPDI

SEQ ID NO: 2544 - protein, 40 aa, Artificial Sequence
  Description of Artificial Sequence: Synthetic polypeptide
ENYRRPDIVRSLYEDLEDHPNVQKDLERLTQERIAHQRMG

SEQ ID NO: 2545 - protein, 40 aa, Artificial Sequence
  Description of Artificial Sequence: Synthetic polypeptide
LVKPENYRRLDIVRSPYEDLEDHPNVQKDLERLTQERIAH

SEQ ID NO: 2546 - protein, 40 aa, Artificial Sequence
  Description of Artificial Sequence: Synthetic polypeptide
LPVYTLKERCLQVVRSLVKPENYRRLDIVRSLYEDPEDHP

SEQ ID NO: 2547 - protein, 40 aa, Artificial Sequence
  Description of Artificial Sequence: Synthetic polypeptide
RCLQVVRSLVKPENYRRLDIVRSLYEDPEDHPNVQKDLER

SEQ ID NO: 2548 - protein, 40 aa, Artificial Sequence
  Description of Artificial Sequence: Synthetic polypeptide
RPVLRSVNSREPSQVIFCNGSPRVVLPVWLNFDGEPQPYP

SEQ ID NO: 2549 - protein, 40 aa, Artificial Sequence
  Description of Artificial Sequence: Synthetic polypeptide
PSQVIFCNGSPRVVLPVWLNFDGEPQPYPTLPPGTGRRIH

SEQ ID NO: 2550 - protein, 40 aa, Artificial Sequence
  Description of Artificial Sequence: Synthetic polypeptide
EELGAEEEMEAGRPRPVLRSVNSREPSQVIFCNRRPRVVL

SEQ ID NO: 2551 - protein, 40 aa, Artificial Sequence
  Description of Artificial Sequence: Synthetic polypeptide
GRPRPVLRSVNSREPSQVIFCNRSPPVVLPVWLNFDGEPQ

SEQ ID NO: 2552 - protein, 40 aa, Artificial Sequence
  Description of Artificial Sequence: Synthetic polypeptide
PVLRSVNSREPSQVIFCNRSPPVVLPVWLNFDGEPQPYPT

SEQ ID NO: 2553 - protein, 40 aa, Artificial Sequence
  Description of Artificial Sequence: Synthetic polypeptide
EEEMEAGRPRPVLRSVNSREPSQVIFCNRSPRVVLPVWHN

SEQ ID NO: 2554 - protein, 40 aa, Artificial Sequence
  Description of Artificial Sequence: Synthetic polypeptide
QQQQKGGGGSQINSTRYKTELYRPFEESGTCKYGEKCQFA

SEQ ID NO: 2555 - protein, 40 aa, Artificial Sequence
  Description of Artificial Sequence: Synthetic polypeptide
HIIETKFEMIKLIDIARQTAQGMDYLDAKSIIHRDLKSNN

SEQ ID NO: 2556 - protein, 40 aa, Artificial Sequence
  Description of Artificial Sequence: Synthetic polypeptide
DIARQTAQGMDYLDAKSIIHRDLKSNNIFLHEDLTVKIGD

SEQ ID NO: 2557 - protein, 40 aa, Artificial Sequence
  Description of Artificial Sequence: Synthetic polypeptide
IKLIDIARQTAQGMDYLHAKSIIHKDLKSNNIFLHEDLTV

SEQ ID NO: 2558 - protein, 40 aa, Artificial Sequence
  Description of Artificial Sequence: Synthetic polypeptide
YLHAKSIIHKDLKSNNIFLHEDLTVKIGDFGLATVKSRWS

SEQ ID NO: 2559 - protein, 40 aa, Artificial Sequence
  Description of Artificial Sequence: Synthetic polypeptide
LHAKSIIHKDLKSNNIFLHEDLTVKIGDFGLATVKSRWSG

SEQ ID NO: 2560 - protein, 40 aa, Artificial Sequence
  Description of Artificial Sequence: Synthetic polypeptide
HAKSIIHKDLKSNNIFLHEDLTVKIGDFGLATVKSRWSGS

SEQ ID NO: 2561 - protein, 40 aa, Artificial Sequence
  Description of Artificial Sequence: Synthetic polypeptide
IHKDLKSNNIFLHEDLTVKIGDFGLATVKSRWSGSHQFEQ

SEQ ID NO: 2562 - protein, 40 aa, Artificial Sequence
  Description of Artificial Sequence: Synthetic polypeptide
HKDLKSNNIFLHEDLTVKIGDFGLATVKSRWSGSHQFEQL

SEQ ID NO: 2563 - protein, 40 aa, Artificial Sequence
  Description of Artificial Sequence: Synthetic polypeptide
ETKFEMIKLIDIARQTAQGMDYLHAKSIIHRDLKSNIIFL

SEQ ID NO: 2564 - protein, 40 aa, Artificial Sequence
  Description of Artificial Sequence: Synthetic polypeptide
RDLKSNIIFLHEDLTVKIGDFGLATVKSRWSGSHQFEQLS

SEQ ID NO: 2565 - protein, 40 aa, Artificial Sequence
  Description of Artificial Sequence: Synthetic polypeptide
IIHRDLKSNNIFLHEDLTVKIGGFGLATVKSRWSGSHQFE

SEQ ID NO: 2566 - protein, 40 aa, Artificial Sequence
  Description of Artificial Sequence: Synthetic polypeptide
HRDLKSNNIFLHEDLTVKIGGFGLATVKSRWSGSHQFEQL

SEQ ID NO: 2567 - protein, 40 aa, Artificial Sequence
  Description of Artificial Sequence: Synthetic polypeptide
DLKSNNIFLHEDLTVKIGGFGLATVKSRWSGSHQFEQLSG

SEQ ID NO: 2568 - protein, 40 aa, Artificial Sequence
  Description of Artificial Sequence: Synthetic polypeptide
KSNNIFLHEDLTVKIGGFGLATVKSRWSGSHQFEQLSGSI

SEQ ID NO: 2569 - protein, 40 aa, Artificial Sequence
  Description of Artificial Sequence: Synthetic polypeptide
YLHAKSIIHRDLKSNNIFLHEDLTVKIGNFGLATVKSRWS

SEQ ID NO: 2570 - protein, 40 aa, Artificial Sequence
  Description of Artificial Sequence: Synthetic polypeptide
NIFLHEDLTVKIGNFGLATVKSRWSGSHQFEQLSGSILWM

SEQ ID NO: 2571 - protein, 40 aa, Artificial Sequence
  Description of Artificial Sequence: Synthetic polypeptide
HAKSIIHRDLKSNNIFLHEDLTVKIGDFDLATVKSRWSGS

SEQ ID NO: 2572 - protein, 40 aa, Artificial Sequence
  Description of Artificial Sequence: Synthetic polypeptide
YLHAKSIIHRDLKSNNIFLHEDLTVKIGDFSLATVKSRWS

SEQ ID NO: 2573 - protein, 40 aa, Artificial Sequence
  Description of Artificial Sequence: Synthetic polypeptide
LHAKSIIHRDLKSNNIFLHEDLTVKIGDFSLATVKSRWSG

SEQ ID NO: 2574 - protein, 40 aa, Artificial Sequence
  Description of Artificial Sequence: Synthetic polypeptide
DLKSNNIFLHEDLTVKIGDFSLATVKSRWSGSHQFEQLSG

SEQ ID NO: 2575 - protein, 40 aa, Artificial Sequence
  Description of Artificial Sequence: Synthetic polypeptide
LKSNNIFLHEDLTVKIGDFSLATVKSRWSGSHQFEQLSGS

SEQ ID NO: 2576 - protein, 40 aa, Artificial Sequence
  Description of Artificial Sequence: Synthetic polypeptide
YLHAKSIIHRDLKSNNIFLHEDLTVKIGDFGQATVKSRWS

SEQ ID NO: 2577 - protein, 40 aa, Artificial Sequence
  Description of Artificial Sequence: Synthetic polypeptide
HAKSIIHRDLKSNNIFLHEDLTVKIGDFGQATVKSRWSGS

SEQ ID NO: 2578 - protein, 40 aa, Artificial Sequence
  Description of Artificial Sequence: Synthetic polypeptide
HRDLKSNNIFLHEDLTVKIGDFGQATVKSRWSGSHQFEQL

SEQ ID NO: 2579 - protein, 40 aa, Artificial Sequence
  Description of Artificial Sequence: Synthetic polypeptide
NIFLHEDLTVKIGDFGQATVKSRWSGSHQFEQLSGSILWM

SEQ ID NO: 2580 - protein, 40 aa, Artificial Sequence
  Description of Artificial Sequence: Synthetic polypeptide
YLHAKSIIHRDLKSNNIFLHEDLTVKIGDFGVATVKSRWS

SEQ ID NO: 2581 - protein, 40 aa, Artificial Sequence
  Description of Artificial Sequence: Synthetic polypeptide
LHAKSIIHRDLKSNNIFLHEDLTVKIGDFGVATVKSRWSG

SEQ ID NO: 2582 - protein, 40 aa, Artificial Sequence
  Description of Artificial Sequence: Synthetic polypeptide
DLKSNNIFLHEDLTVKIGDFGVATVKSRWSGSHQFEQLSG

SEQ ID NO: 2583 - protein, 40 aa, Artificial Sequence
  Description of Artificial Sequence: Synthetic polypeptide
LKSNNIFLHEDLTVKIGDFGVATVKSRWSGSHQFEQLSGS

SEQ ID NO: 2584 - protein, 40 aa, Artificial Sequence
  Description of Artificial Sequence: Synthetic polypeptide
HAKSIIHRDLKSNNIFLHEDLTVKIGDFGLATEKSRWSGS

SEQ ID NO: 2585 - protein, 40 aa, Artificial Sequence
  Description of Artificial Sequence: Synthetic polypeptide
DLKSNNIFLHEDLTVKIGDFGLATEKSRWSGSHQFEQLSG

SEQ ID NO: 2586 - protein, 40 aa, Artificial Sequence
  Description of Artificial Sequence: Synthetic polypeptide
NIFLHEDLTVKIGDFGLATEKSRWSGSHQFEQLSGSILWM

SEQ ID NO: 2587 - protein, 40 aa, Artificial Sequence
  Description of Artificial Sequence: Synthetic polypeptide
KVFFIQACQGDNYQKGIPVETDSEEQPYLEMDLSSPQTRY

SEQ ID NO: 2588 - protein, 40 aa, Artificial Sequence
  Description of Artificial Sequence: Synthetic polypeptide
KVFFIQACQGDNYQGGIPVETDSEEQPYLEMDLSSPQTRY

SEQ ID NO: 2589 - protein, 40 aa, Artificial Sequence
  Description of Artificial Sequence: Synthetic polypeptide
RERIATYTLFSHAVSSNGNAVEDPMEILITVTDQNNNKPE

SEQ ID NO: 2590 - protein, 40 aa, Artificial Sequence
  Description of Artificial Sequence: Synthetic polypeptide
SNGNAVEDPMEILITVTDQNNNKPEFTQEVFKGSVMEGAL

SEQ ID NO: 2591 - protein, 40 aa, Artificial Sequence
  Description of Artificial Sequence: Synthetic polypeptide
MEVTATDAGDDVNTYNAAIAYTILSQDPELPDKNMFTINR

SEQ ID NO: 2592 - protein, 40 aa, Artificial Sequence
  Description of Artificial Sequence: Synthetic polypeptide
HRDLKPENVLLSSQEEDCLIKITDFGHSKILGETSLRRTL

SEQ ID NO: 2593 - protein, 40 aa, Artificial Sequence
  Description of Artificial Sequence: Synthetic polypeptide
RDLKPENVLLSSQEEDCLIKITDFGHSKILGETSLRRTLC

SEQ ID NO: 2594 - protein, 40 aa, Artificial Sequence
  Description of Artificial Sequence: Synthetic polypeptide
KITDFGHSKILGETSLRRTLCGTPTYLAPEVLVSVGTAGY

SEQ ID NO: 2595 - protein, 40 aa, Artificial Sequence
  Description of Artificial Sequence: Synthetic polypeptide
KILGETSLRRTLCGTPTYLAPEVLVSVGTAGYNRAVDCWS

SEQ ID NO: 2596 - protein, 40 aa, Artificial Sequence
  Description of Artificial Sequence: Synthetic polypeptide
ETSLRRTLCGTPTYLAPEVLVSVGTAGYNRAVDCWSLGVI

SEQ ID NO: 2597 - protein, 40 aa, Artificial Sequence
  Description of Artificial Sequence: Synthetic polypeptide
SQEEDCLIKITDFGHSKILGETSLMRTLCGTLTYLAPEVL

SEQ ID NO: 2598 - protein, 40 aa, Artificial Sequence
  Description of Artificial Sequence: Synthetic polypeptide
IKITDFGHSKILGETSLMRTLCGTLTYLAPEVLVSVGTAG

SEQ ID NO: 2599 - protein, 40 aa, Artificial Sequence
  Description of Artificial Sequence: Synthetic polypeptide
KITDFGHSKILGETSLMRTLCGTLTYLAPEVLVSVGTAGY

SEQ ID NO: 2600 - protein, 40 aa, Artificial Sequence
  Description of Artificial Sequence: Synthetic polypeptide
GETSLMRTLCGTLTYLAPEVLVSVGTAGYNRAVDCWSLGV

SEQ ID NO: 2601 - protein, 40 aa, Artificial Sequence
  Description of Artificial Sequence: Synthetic polypeptide
SSQEEDCLIKITDFGHSKILGETSLMRTLCGTYTYLAPEV

SEQ ID NO: 2602 - protein, 40 aa, Artificial Sequence
  Description of Artificial Sequence: Synthetic polypeptide
IKITDFGHSKILGETSLMRTLCGTYTYLAPEVLVSVGTAG

SEQ ID NO: 2603 - protein, 40 aa, Artificial Sequence
  Description of Artificial Sequence: Synthetic polypeptide
ITDFGHSKILGETSLMRTLCGTYTYLAPEVLVSVGTAGYN

SEQ ID NO: 2604 - protein, 40 aa, Artificial Sequence
  Description of Artificial Sequence: Synthetic polypeptide
TSLMRTLCGTYTYLAPEVLVSVGTAGYNRAVDCWSLGVIL

SEQ ID NO: 2605 - protein, 40 aa, Artificial Sequence
  Description of Artificial Sequence: Synthetic polypeptide
SSQEEDCLIKITDFGHSKILGETSLMRTLCGTPHYLAPEV

SEQ ID NO: 2606 - protein, 40 aa, Artificial Sequence
  Description of Artificial Sequence: Synthetic polypeptide
ITDFGHSKILGETSLMRTLCGTPHYLAPEVLVSVGTAGYN

SEQ ID NO: 2607 - protein, 40 aa, Artificial Sequence
  Description of Artificial Sequence: Synthetic polypeptide
GETSLMRTLCGTPTYLAPEVLVSVGTAGYNRAVDCWSLGF

SEQ ID NO: 2608 - protein, 40 aa, Artificial Sequence
  Description of Artificial Sequence: Synthetic polypeptide
TPTYLAPEVLVSVGTAGYNRAVDCWSLGFILFICLSGYPP

SEQ ID NO: 2609 - protein, 40 aa, Artificial Sequence
  Description of Artificial Sequence: Synthetic polypeptide
GVILFICLSGYPPFSEHRTQVSLKDQITSGKYNFIPEVGA

SEQ ID NO: 2610 - protein, 40 aa, Artificial Sequence
  Description of Artificial Sequence: Synthetic polypeptide
NQESKLIILASGGPQALVNIMRTYTFEKLLWTTSRVLKVL

SEQ ID NO: 2611 - protein, 40 aa, Artificial Sequence
  Description of Artificial Sequence: Synthetic polypeptide
IILASGGPQALVNIMRTYTFEKLLWTTSRVLKVLSVCSSN

SEQ ID NO: 2612 - protein, 40 aa, Artificial Sequence
  Description of Artificial Sequence: Synthetic polypeptide
ILASGGPQALVNIMRTYTFEKLLWTTSRVLKVLSVCSSNK

SEQ ID NO: 2613 - protein, 40 aa, Artificial Sequence
  Description of Artificial Sequence: Synthetic polypeptide
GGPQALVNIMRTYTFEKLLWTTSRVLKVLSVCSSNKPAIV

SEQ ID NO: 2614 - protein, 40 aa, Artificial Sequence
  Description of Artificial Sequence: Synthetic polypeptide
ALVNIMRTYTFEKLLWTTSRVLKVLSVCSSNKPAIVEAGG

SEQ ID NO: 2615 - protein, 40 aa, Artificial Sequence
  Description of Artificial Sequence: Synthetic polypeptide
IMRTYTFEKLLWTTSRVLKVLSVCSSNKPAIVEAGGMQAL

SEQ ID NO: 2616 - protein, 40 aa, Artificial Sequence
  Description of Artificial Sequence: Synthetic polypeptide
QESKLIILASGGPQALVNIMRTYTYKKLLWTTSRVLKVLS

SEQ ID NO: 2617 - protein, 40 aa, Artificial Sequence
  Description of Artificial Sequence: Synthetic polypeptide
IILASGGPQALVNIMRTYTYKKLLWTTSRVLKVLSVCSSN

SEQ ID NO: 2618 - protein, 40 aa, Artificial Sequence
  Description of Artificial Sequence: Synthetic polypeptide
GPQALVNIMRTYTYKKLLWTTSRVLKVLSVCSSNKPAIVE

SEQ ID NO: 2619 - protein, 40 aa, Artificial Sequence
  Description of Artificial Sequence: Synthetic polypeptide
DCLQILAYGNQESKLIILASGGPQALVNIMRTYTYETLLW

SEQ ID NO: 2620 - protein, 40 aa, Artificial Sequence
  Description of Artificial Sequence: Synthetic polypeptide
SGGPQALVNIMRTYTYETLLWTTSRVLKVLSVCSSNKPAI

SEQ ID NO: 2621 - protein, 40 aa, Artificial Sequence
  Description of Artificial Sequence: Synthetic polypeptide
GGPQALVNIMRTYTYETLLWTTSRVLKVLSVCSSNKPAIV

SEQ ID NO: 2622 - protein, 40 aa, Artificial Sequence
  Description of Artificial Sequence: Synthetic polypeptide
GPQALVNIMRTYTYETLLWTTSRVLKVLSVCSSNKPAIVE

SEQ ID NO: 2623 - protein, 40 aa, Artificial Sequence
  Description of Artificial Sequence: Synthetic polypeptide
ALVNIMRTYTYETLLWTTSRVLKVLSVCSSNKPAIVEAGG

SEQ ID NO: 2624 - protein, 40 aa, Artificial Sequence
  Description of Artificial Sequence: Synthetic polypeptide
GNLSDAATKQEGMEGLLGTLVQLLGSDDINVVTCAAGILS

SEQ ID NO: 2625 - protein, 40 aa, Artificial Sequence
  Description of Artificial Sequence: Synthetic polypeptide
EGMEGLLGTLVQLLGSDDINVVTCAAGILSDLTCNNYKNK

SEQ ID NO: 2626 - protein, 40 aa, Artificial Sequence
  Description of Artificial Sequence: Synthetic polypeptide
GMEGLLGTLVQLLGSDDINVVTCAAGILSDLTCNNYKNKM

SEQ ID NO: 2627 - protein, 40 aa, Artificial Sequence
  Description of Artificial Sequence: Synthetic polypeptide
MEGLLGTLVQLLGSDDINVVTCAAGILSDLTCNNYKNKMM

SEQ ID NO: 2628 - protein, 40 aa, Artificial Sequence
  Description of Artificial Sequence: Synthetic polypeptide
EGLLGTLVQLLGSDDINVVTCAAGILSDLTCNNYKNKMMV

SEQ ID NO: 2629 - protein, 40 aa, Artificial Sequence
  Description of Artificial Sequence: Synthetic polypeptide
QLLGSDDINVVTCAAGILSDLTCNNYKNKMMVCQVGGIEA

SEQ ID NO: 2630 - protein, 40 aa, Artificial Sequence
  Description of Artificial Sequence: Synthetic polypeptide
NFDLPSDIEEYVHCIGRTGRVGNLGLATSFFNERNINITK

SEQ ID NO: 2631 - protein, 40 aa, Artificial Sequence
  Description of Artificial Sequence: Synthetic polypeptide
INFDLPSDIEEYVHRIGRAGRVGNLGLATSFFNERNINIT

SEQ ID NO: 2632 - protein, 40 aa, Artificial Sequence
  Description of Artificial Sequence: Synthetic polypeptide
GRAGRVGNLGLATSFFNERNINITKDLLDLLVEAKQEVPS

SEQ ID NO: 2633 - protein, 40 aa, Artificial Sequence
  Description of Artificial Sequence: Synthetic polypeptide
ISNVKHVINFDLPSDIEEYVHRIGRMGRVGNLGLATSFFN

SEQ ID NO: 2634 - protein, 40 aa, Artificial Sequence
  Description of Artificial Sequence: Synthetic polypeptide
GRMGRVGNLGLATSFFNERNINITKDLLDLLVEAKQEVPS

SEQ ID NO: 2635 - protein, 40 aa, Artificial Sequence
  Description of Artificial Sequence: Synthetic polypeptide
SGFENFEKKINYRFKNKAYLLQAFTHASYHYNTITDCYQS

SEQ ID NO: 2636 - protein, 40 aa, Artificial Sequence
  Description of Artificial Sequence: Synthetic polypeptide
FENFEKKINYRFKNKAYLLQAFTHASYHYNTITDCYQSLE

SEQ ID NO: 2637 - protein, 40 aa, Artificial Sequence
  Description of Artificial Sequence: Synthetic polypeptide
DDFVQFQLEKNEMQGMDSELRRSEEDEEKEEDIEVPKAMR

SEQ ID NO: 2638 - protein, 40 aa, Artificial Sequence
  Description of Artificial Sequence: Synthetic polypeptide
VPKAMRDIFESLAGAIYMDSGMSLETVWQVYYPMMRPLIE

SEQ ID NO: 2639 - protein, 40 aa, Artificial Sequence
  Description of Artificial Sequence: Synthetic polypeptide
AMGVIFESLAGAIYMDSGMSLETVWQVYYPMMRPLIEKFS

SEQ ID NO: 2640 - protein, 40 aa, Artificial Sequence
  Description of Artificial Sequence: Synthetic polypeptide
NTVERIPLENLQIIKGNMYYENSYALAVLSNYDANKTGLK

SEQ ID NO: 2641 - protein, 40 aa, Artificial Sequence
  Description of Artificial Sequence: Synthetic polypeptide
RIPLENLQIIKGNMYYENSYALAVLSNYDANKTGLKELPM

SEQ ID NO: 2642 - protein, 40 aa, Artificial Sequence
  Description of Artificial Sequence: Synthetic polypeptide
QIIKGNMYYENSYALAVLSNYDANKTGLKELPMRNLQEIL

SEQ ID NO: 2643 - protein, 40 aa, Artificial Sequence
  Description of Artificial Sequence: Synthetic polypeptide
IIKGNMYYENSYALAVLSNYDANKTGLKELPMRNLQEILH

SEQ ID NO: 2644 - protein, 40 aa, Artificial Sequence
  Description of Artificial Sequence: Synthetic polypeptide
KGNMYYENSYALAVLSNYDANKTGLKELPMRNLQEILHGA

SEQ ID NO: 2645 - protein, 40 aa, Artificial Sequence
  Description of Artificial Sequence: Synthetic polypeptide
GTTCVKKCPRNYVVTDHGSCVRACGADSYEMEEDGVRKCK

SEQ ID NO: 2646 - protein, 40 aa, Artificial Sequence
  Description of Artificial Sequence: Synthetic polypeptide
GVTCVKKCPRNYVVTDHGSCVRACGADSYEMEEDGVRKCK

SEQ ID NO: 2647 - protein, 40 aa, Artificial Sequence
  Description of Artificial Sequence: Synthetic polypeptide
EAPNQALLRILKETEFKKIKVLCSGAFGTVYKGLWIPEGE

SEQ ID NO: 2648 - protein, 40 aa, Artificial Sequence
  Description of Artificial Sequence: Synthetic polypeptide
NQALLRILKETEFKKIKVLCSGAFGTVYKGLWIPEGEKVK

SEQ ID NO: 2649 - protein, 40 aa, Artificial Sequence
  Description of Artificial Sequence: Synthetic polypeptide
LKETEFKKIKVLDSGAFGTVYKGLWIPEGEKVKIPVAIKE

SEQ ID NO: 2650 - protein, 40 aa, Artificial Sequence
  Description of Artificial Sequence: Synthetic polypeptide
LVEPLTPSGEAPNQALLRILKETEFKKIKVLGSGAFSTVY

SEQ ID NO: 2651 - protein, 40 aa, Artificial Sequence
  Description of Artificial Sequence: Synthetic polypeptide
SGEAPNQALLRILKETEFKKIKVLGSGAFSTVYKGLWIPE

SEQ ID NO: 2652 - protein, 40 aa, Artificial Sequence
  Description of Artificial Sequence: Synthetic polypeptide
EAPNQALLRILKETEFKKIKVLGSGAFSTVYKGLWIPEGE

SEQ ID NO: 2653 - protein, 40 aa, Artificial Sequence
  Description of Artificial Sequence: Synthetic polypeptide
GAFGTVYKGLWIPEGEKVKIPVAIKELREATSPKANKENL

SEQ ID NO: 2654 - protein, 40 aa, Artificial Sequence
  Description of Artificial Sequence: Synthetic polypeptide
WIPEGEKVKIPVAIKELREATSPKANKENLDEAYVMASVD

SEQ ID NO: 2655 - protein, 40 aa, Artificial Sequence
  Description of Artificial Sequence: Synthetic polypeptide
IPEGEKVKIPVAIKELREATSPKANKENLDEAYVMASVDN

SEQ ID NO: 2656 - protein, 40 aa, Artificial Sequence
  Description of Artificial Sequence: Synthetic polypeptide
YISYLNSVHFFRPKCLRTAVYHEILIGYLEYVKKLGYTTG

SEQ ID NO: 2657 - protein, 40 aa, Artificial Sequence
  Description of Artificial Sequence: Synthetic polypeptide
RRVYISYLDIVHFFRPKCLRTAVYHEILIGYLEYVKKLGY

SEQ ID NO: 2658 - protein, 40 aa, Artificial Sequence
  Description of Artificial Sequence: Synthetic polypeptide
LDIVHFFRPKCLRTAVYHEILIGYLEYVKKLGYTTGHIWA

SEQ ID NO: 2659 - protein, 40 aa, Artificial Sequence
  Description of Artificial Sequence: Synthetic polypeptide
CPPPNQRRVYISYLDSVHFFRPKCLRTAVCHEILIGYLEY

SEQ ID NO: 2660 - protein, 40 aa, Artificial Sequence
  Description of Artificial Sequence: Synthetic polypeptide
FFRPKCLRTAVDHEILIGYLEYVKKLGYTTGHIWACPPSE

SEQ ID NO: 2661 - protein, 40 aa, Artificial Sequence
  Description of Artificial Sequence: Synthetic polypeptide
GAFGTVYKGIWIPDGENVKIPVAIKVMRENTSPKANKEIL

SEQ ID NO: 2662 - protein, 40 aa, Artificial Sequence
  Description of Artificial Sequence: Synthetic polypeptide
GAFGTVYKGIWIPDGENVKIPVAIKVSRENTSPKANKEIL

SEQ ID NO: 2663 - protein, 40 aa, Artificial Sequence
  Description of Artificial Sequence: Synthetic polypeptide
AIKILNETTGPKANVEFMDEALIMASMDHPHLVRLLRVCL

SEQ ID NO: 2664 - protein, 40 aa, Artificial Sequence
  Description of Artificial Sequence: Synthetic polypeptide
VLMGHVAAVRLVQYDGRRVVSGAYDFMVKVWDPETETCLH

SEQ ID NO: 2665 - protein, 40 aa, Artificial Sequence
  Description of Artificial Sequence: Synthetic polypeptide
RRVVSGAYDFMVKVWDPETETCLHTLQGHTNRVCSLQFDG

SEQ ID NO: 2666 - protein, 40 aa, Artificial Sequence
  Description of Artificial Sequence: Synthetic polypeptide
FMVKVWDPETETCLHTLQGHTNRVCSLQFDGIHVVSGSLD

SEQ ID NO: 2667 - protein, 40 aa, Artificial Sequence
  Description of Artificial Sequence: Synthetic polypeptide
YDFMVKVWDPETETCLHTLQGHTNRVHSLQFDGIHVVSGS

SEQ ID NO: 2668 - protein, 40 aa, Artificial Sequence
  Description of Artificial Sequence: Synthetic polypeptide
VSGSLDTSIRVWDVETGNCIHTLTGHQVLTSGMELKDNIL

SEQ ID NO: 2669 - protein, 40 aa, Artificial Sequence
  Description of Artificial Sequence: Synthetic polypeptide
TEKDLSDLVSEMEMMKMIGKQKNIINLLGACTQDGPLYVI

SEQ ID NO: 2670 - protein, 40 aa, Artificial Sequence
  Description of Artificial Sequence: Synthetic polypeptide
DLSDLVSEMEMMKMIGKQKNIINLLGACTQDGPLYVIVEY

SEQ ID NO: 2671 - protein, 40 aa, Artificial Sequence
  Description of Artificial Sequence: Synthetic polypeptide
KQKNIINLLGACTQDGPLYVIVEYASKGNLREYLRARRPP

SEQ ID NO: 2672 - protein, 40 aa, Artificial Sequence
  Description of Artificial Sequence: Synthetic polypeptide
EYFYVDFREYEYDLKWEFPRENLEFGKVLESGAFGKVMNA

SEQ ID NO: 2673 - protein, 40 aa, Artificial Sequence
  Description of Artificial Sequence: Synthetic polypeptide
LESGAFGKVMNATAYGISKTGVSIQVAVKMLKEKADSSER

SEQ ID NO: 2674 - protein, 40 aa, Artificial Sequence
  Description of Artificial Sequence: Synthetic polypeptide
NEYFYVDFREYEYDLKWEFPRENLEFGKVLGLGAFGKVMN

SEQ ID NO: 2675 - protein, 40 aa, Artificial Sequence
  Description of Artificial Sequence: Synthetic polypeptide
EYFYVDFREYEYDLKWEFPRENLEFGKVLGLGAFGKVMNA

SEQ ID NO: 2676 - protein, 40 aa, Artificial Sequence
  Description of Artificial Sequence: Synthetic polypeptide
FPRENLEFGKVLGLGAFGKVMNATAYGISKTGVSIQVAVK

SEQ ID NO: 2677 - protein, 40 aa, Artificial Sequence
  Description of Artificial Sequence: Synthetic polypeptide
PRENLEFGKVLGLGAFGKVMNATAYGISKTGVSIQVAVKM

SEQ ID NO: 2678 - protein, 40 aa, Artificial Sequence
  Description of Artificial Sequence: Synthetic polypeptide
EFGKVLGLGAFGKVMNATAYGISKTGVSIQVAVKMLKEKA

SEQ ID NO: 2679 - protein, 40 aa, Artificial Sequence
  Description of Artificial Sequence: Synthetic polypeptide
QSVIFRMVDVGGPRSERRKWIHCFENVTSIMFLVALSEYD

SEQ ID NO: 2680 - protein, 40 aa, Artificial Sequence
  Description of Artificial Sequence: Synthetic polypeptide
HCFENVTSIMFLVALSEYDQVLVESDNENGMEESKALFRT

SEQ ID NO: 2681 - protein, 40 aa, Artificial Sequence
  Description of Artificial Sequence: Synthetic polypeptide
QVLVESDNENGMEESKALFRTIITYPWFQNSSVILFLNKK

SEQ ID NO: 2682 - protein, 40 aa, Artificial Sequence
  Description of Artificial Sequence: Synthetic polypeptide
NENGMEESKALFRTIITYPWFQNSSVILFLNKKDLLEEKI

SEQ ID NO: 2683 - protein, 40 aa, Artificial Sequence
  Description of Artificial Sequence: Synthetic polypeptide
IVALCVLKGGYKFFADLLDYIKALNRNSDRSIPMTVDFIR

SEQ ID NO: 2684 - protein, 40 aa, Artificial Sequence; identical to SEQ ID NO: 1017
  Description of Artificial Sequence: Synthetic polypeptide

SEQ ID NO: 2685 - protein, 40 aa, Artificial Sequence
  Description of Artificial Sequence: Synthetic polypeptide
SVERYEPERDEWHLVAPMLTRRIGVGVAVLNRLLYAVGSF

SEQ ID NO: 2686 - protein, 40 aa, Artificial Sequence
  Description of Artificial Sequence: Synthetic polypeptide
AGMMCIIVMILTYKYLQKPMYEVQWKGVEEINGNNYVYID

SEQ ID NO: 2687 - protein, 40 aa, Artificial Sequence
  Description of Artificial Sequence: Synthetic polypeptide
TYKYLQKPMYEVQWKGVEEINGNNYVYIDPTQLPYDHKWE

SEQ ID NO: 2688 - protein, 40 aa, Artificial Sequence
  Description of Artificial Sequence: Synthetic polypeptide
PMYEVQWKGVEEINGNNYVYIDPTQLPYDHKWEFPRNRLS

SEQ ID NO: 2689 - protein, 40 aa, Artificial Sequence
  Description of Artificial Sequence: Synthetic polypeptide
EVQWKGVEEINGNNYVYIDPTQLPYDHKWEFPRNRLSFGK

SEQ ID NO: 2690 - protein, 40 aa, Artificial Sequence
  Description of Artificial Sequence: Synthetic polypeptide
WKVVEEINGNNYVYIDQTQLPYDHKWEFPRNRLSFGKTLG

SEQ ID NO: 2691 - protein, 40 aa, Artificial Sequence
  Description of Artificial Sequence: Synthetic polypeptide
KVVEEINGNNYVYIDQTQLPYDHKWEFPRNRLSFGKTLGA

SEQ ID NO: 2692 - protein, 40 aa, Artificial Sequence
  Description of Artificial Sequence: Synthetic polypeptide
EEINGNNYVYIDQTQLPYDHKWEFPRNRLSFGKTLGAGAF

SEQ ID NO: 2693 - protein, 40 aa, Artificial Sequence
  Description of Artificial Sequence: Synthetic polypeptide
NGNNYVYIDQTQLPYDHKWEFPRNRLSFGKTLGAGAFGKV

SEQ ID NO: 2694 - protein, 40 aa, Artificial Sequence
  Description of Artificial Sequence: Synthetic polypeptide
PMYEVQWKVVEEINGNNYVYIDPTQPPYDHKWEFPRNRLS

SEQ ID NO: 2695 - protein, 40 aa, Artificial Sequence
  Description of Artificial Sequence: Synthetic polypeptide
KVVEEINGNNYVYIDPTQPPYDHKWEFPRNRLSFGKTLGA

SEQ ID NO: 2696 - protein, 40 aa, Artificial Sequence
  Description of Artificial Sequence: Synthetic polypeptide
EEINGNNYVYIDPTQPPYDHKWEFPRNRLSFGKTLGAGAF

SEQ ID NO: 2697 - protein, 40 aa, Artificial Sequence
  Description of Artificial Sequence: Synthetic polypeptide
INGNNYVYIDPTQPPYDHKWEFPRNRLSFGKTLGAGAFGK

SEQ ID NO: 2698 - protein, 40 aa, Artificial Sequence
  Description of Artificial Sequence: Synthetic polypeptide
SAHLTEREVLMSELKVLSYLGNHMNIVNLLGACTIGGPTL

SEQ ID NO: 2699 - protein, 40 aa, Artificial Sequence
  Description of Artificial Sequence: Synthetic polypeptide
VLMSELKVLSYLGNHMNIVNLLGACTIGGPTLVITEYCCY

SEQ ID NO: 2700 - protein, 40 aa, Artificial Sequence
  Description of Artificial Sequence: Synthetic polypeptide
REAHMSELKVLSYLGNHMNIVNLLGACTIGGPTLVITEYC

SEQ ID NO: 2701 - protein, 40 aa, Artificial Sequence
  Description of Artificial Sequence: Synthetic polypeptide
EVLSYLGNHMNIVNLLGACTIGGPTLVITEYCCYGDLLNF

SEQ ID NO: 2702 - protein, 40 aa, Artificial Sequence
  Description of Artificial Sequence: Synthetic polypeptide
ASKNCIHRDLAARNILLTHGRITKICDFGLARVIKNDSNY

SEQ ID NO: 2703 - protein, 40 aa, Artificial Sequence
  Description of Artificial Sequence: Synthetic polypeptide
TKICDFGLARYIKNDSNYVVKGNARLPVKWMAPESIFNCV

SEQ ID NO: 2704 - protein, 40 aa, Artificial Sequence
  Description of Artificial Sequence: Synthetic polypeptide
VKDSEDVPMVLVGNNCDLPSRTVDTKQAQDLARSYGIPFI

SEQ ID NO: 2705 - protein, 40 aa, Artificial Sequence
  Description of Artificial Sequence: Synthetic polypeptide
VLVGNNCDLPSRTVDTKQAQDLARSYGIPFIETSAKTRQR

SEQ ID NO: 2706 - protein, 40 aa, Artificial Sequence
  Description of Artificial Sequence: Synthetic polypeptide
SAFTIQLIQNHFVDEYDPTIEDSYRKQVVIDGETCLLDIL

SEQ ID NO: 2707 - protein, 40 aa, Artificial Sequence
  Description of Artificial Sequence: Synthetic polypeptide
VGKSALRIQLIQNHFVDEYDPTIEDSYRKQVVIDGETCLL

SEQ ID NO: 2708 - protein, 40 aa, Artificial Sequence
  Description of Artificial Sequence: Synthetic polypeptide
QVVIDGETCLLDILDTGGQEEYSAMRDQYMRTGEGFLCVF

SEQ ID NO: 2709 - protein, 40 aa, Artificial Sequence
  Description of Artificial Sequence: Synthetic polypeptide
GETCLLDILDTGGQEEYSAMRDQYMRTGEGFLCVFAINNT

SEQ ID NO: 2710 - protein, 40 aa, Artificial Sequence
  Description of Artificial Sequence: Synthetic polypeptide
ILDTGGQEEYSAMRDQYMRTGEGFLCVFAINNTKSFEDIH

SEQ ID NO: 2711 - protein, 40 aa, Artificial Sequence
  Description of Artificial Sequence: Synthetic polypeptide
DGETCLLDILDTTGQEEYSAMRDQYMRTGEGFLCVFAINN

SEQ ID NO: 2712 - protein, 40 aa, Artificial Sequence; identical to SEQ ID NO: 887
  Description of Artificial Sequence: Synthetic polypeptide

SEQ ID NO: 2713 - protein, 40 aa, Artificial Sequence
  Description of Artificial Sequence: Synthetic polypeptide
IEDSYRKQVVIDGETCLLDILDTAGKEEYSAMRDQYMRTG

SEQ ID NO: 2714 - protein, 40 aa, Artificial Sequence
  Description of Artificial Sequence: Synthetic polypeptide
SYRKQVVIDGETCLLDILDTAGKEEYSAMRDQYMRTGEGF

SEQ ID NO: 2715 - protein, 40 aa, Artificial Sequence
  Description of Artificial Sequence: Synthetic polypeptide
VDEYDPTIEDSYRKQVVIDGETCLLDILDTAGREEYSAMR

SEQ ID NO: 2716 - protein, 40 aa, Artificial Sequence
  Description of Artificial Sequence: Synthetic polypeptide
QVVIDGETCLLDILDTAGREEYSAMRDQYMRTGEGFLCVF

SEQ ID NO: 2717 - protein, 40 aa, Artificial Sequence
  Description of Artificial Sequence: Synthetic polypeptide
DGETCLLDILDTAGREEYSAMRDQYMRTGEGFLCVFAINN

SEQ ID NO: 2718 - protein, 40 aa, Artificial Sequence
  Description of Artificial Sequence: Synthetic polypeptide
ILDTAGREEYSAMRDQYMRTGEGFLCVFAINNTKSFEDIH

SEQ ID NO: 2719 - protein, 40 aa, Artificial Sequence
  Description of Artificial Sequence: Synthetic polypeptide
QVVIDGETCLLDILDTAGQKEYSAMRDQYMRTGEGFLCVF

SEQ ID NO: 2720 - protein, 40 aa, Artificial Sequence
  Description of Artificial Sequence: Synthetic polypeptide
DGETCLLDILDTAGQKEYSAMRDQYMRTGEGFLCVFAINN

SEQ ID NO: 2721 - protein, 40 aa, Artificial Sequence
  Description of Artificial Sequence: Synthetic polypeptide
ILDTAGQEKYSAMRDQYMRTGEGFLCVFAINNTKSFEDIH

SEQ ID NO: 2722 - protein, 40 aa, Artificial Sequence
  Description of Artificial Sequence: Synthetic polypeptide
VMARKLIHLEIKPAIRNQIIRELQVLHECNSSYIVGFYGA

SEQ ID NO: 2723 - protein, 40 aa, Artificial Sequence
  Description of Artificial Sequence: Synthetic polypeptide
DEKFTVKVADFGLARDMYDKEYYSVHNKTGAKLHVKWMAL

SEQ ID NO: 2724 - protein, 40 aa, Artificial Sequence
  Description of Artificial Sequence: Synthetic polypeptide
DFGLARDMYDKEYYSVHNKTGAKLHVKWMALESLQTQKFT

SEQ ID NO: 2725 - protein, 40 aa, Artificial Sequence
  Description of Artificial Sequence: Synthetic polypeptide
DMYDKEYYSVHNKTGAKLHVKWMALESLQTQKFTTKSDVW

SEQ ID NO: 2726 - protein, 40 aa, Artificial Sequence
  Description of Artificial Sequence: Synthetic polypeptide
MLDEKFTVKVADFGLARDMYDKEYYSVHNKTGAKLPVCWM

SEQ ID NO: 2727 - protein, 40 aa, Artificial Sequence
  Description of Artificial Sequence: Synthetic polypeptide
FGLARDMYDKEYYSVHNKTGAKLPVCWMALESLQTQKFTT

SEQ ID NO: 2728 - protein, 40 aa, Artificial Sequence
  Description of Artificial Sequence: Synthetic polypeptide
LARDMYDKEYYSVHNKTGAKLPVHWMALESLQTQKFTTKS

SEQ ID NO: 2729 - protein, 40 aa, Artificial Sequence
  Description of Artificial Sequence: Synthetic polypeptide
DMYDKEYYSVHNKTGAKLPVHWMALESLQTQKFTTKSDVW

SEQ ID NO: 2730 - protein, 40 aa, Artificial Sequence
  Description of Artificial Sequence: Synthetic polypeptide
QKKLEKERQEQLQKEQEKAFFAQLQLDEGTGEFLPIQPAQ

SEQ ID NO: 2731 - protein, 40 aa, Artificial Sequence
  Description of Artificial Sequence: Synthetic polypeptide
KLEKERQEQLQKEQEKAFFAQLQLDEGTGEFLPIQPAQHI

SEQ ID NO: 2732 - protein, 40 aa, Artificial Sequence
  Description of Artificial Sequence: Synthetic polypeptide
KKLEKERQEQLQKEQEKAFFAQLQLDEQTGEFLPIQPAQH

SEQ ID NO: 2733 - protein, 40 aa, Artificial Sequence
  Description of Artificial Sequence: Synthetic polypeptide
KLEKERQEQLQKEQEKAFFAQLQLDEEAGEFLPIQPAQHI

SEQ ID NO: 2734 - protein, 40 aa, Artificial Sequence
  Description of Artificial Sequence: Synthetic polypeptide
QKKLEKERQEQLQKEQEKAFFAQLQLDEEIGEFLPIQPAQ

SEQ ID NO: 2735 - protein, 40 aa, Artificial Sequence
  Description of Artificial Sequence: Synthetic polypeptide
KLEKERQEQLQKEQEKAFFAQLQLDEEIGEFLPIQPAQHI

SEQ ID NO: 2736 - protein, 40 aa, Artificial Sequence
  Description of Artificial Sequence: Synthetic polypeptide
QKKLEKERQEQLQKEQEKAFFAQLQLDEETSEFLPIQPAQ

SEQ ID NO: 2737 - protein, 40 aa, Artificial Sequence
  Description of Artificial Sequence: Synthetic polypeptide
RQEQLQKEQEKAFFAQLQLDEETSEFLPIQPAQHIQSETS

SEQ ID NO: 2738 - protein, 40 aa, Artificial Sequence
  Description of Artificial Sequence: Synthetic polypeptide
QKKLEKERQEQLQKEQEKAFFAQLQLDEETVEFLPIQPAQ

SEQ ID NO: 2739 - protein, 40 aa, Artificial Sequence
  Description of Artificial Sequence: Synthetic polypeptide
QKKLEKERQEQLQKEQEKAFFAQLQLDEETGDFLPIQPAQ

SEQ ID NO: 2740 - protein, 40 aa, Artificial Sequence
  Description of Artificial Sequence: Synthetic polypeptide
KERQEQLQKEQEKAFFAQLQLDEETGDFLPIQPAQHIQSE

SEQ ID NO: 2741 - protein, 40 aa, Artificial Sequence
  Description of Artificial Sequence: Synthetic polypeptide
VGADGVGKSALTIQLIQNHFVDEYDPTIEDSYRKQVVIDG

SEQ ID NO: 2742 - protein, 40 aa, Artificial Sequence
  Description of Artificial Sequence: Synthetic polypeptide
GVGNSALTIQLIQNHFVDEYDPTIEDSYRKQVVIDGETCL

SEQ ID NO: 2743 - protein, 40 aa, Artificial Sequence
  Description of Artificial Sequence: Synthetic polypeptide
EYDPTIEDSYRKQVVIDGETCLLDILDTAGHEEYSAMRDQ

SEQ ID NO: 2744 - protein, 40 aa, Artificial Sequence
  Description of Artificial Sequence: Synthetic polypeptide
PTIEDSYRKQVVIDGETCLLDILDTAGREEYSAMRDQYMR

SEQ ID NO: 2745 - protein, 40 aa, Artificial Sequence
  Description of Artificial Sequence: Synthetic polypeptide
TAGREEYSAMRDQYMRTGEGFLCVFAINNSKSFADINLYR

SEQ ID NO: 2746 - protein, 40 aa, Artificial Sequence
  Description of Artificial Sequence: Synthetic polypeptide
PTIEDSYRKQVVIDGETCLLDILDTAGQKEYSAMRDQYMR

SEQ ID NO: 2747 - protein, 40 aa, Artificial Sequence
  Description of Artificial Sequence: Synthetic polypeptide
TAGQKEYSAMRDQYMRTGEGFLCVFAINNSKSFADINLYR

SEQ ID NO: 2748 - protein, 40 aa, Artificial Sequence
  Description of Artificial Sequence: Synthetic polypeptide
RISTATPYMNGETSTKSLWVINSALRIKILCATYGNVNIR

SEQ ID NO: 2749 - protein, 40 aa, Artificial Sequence
  Description of Artificial Sequence: Synthetic polypeptide
STATPYMNGETSTKSLWVINSALRIKILCATYGNVNIRDI

SEQ ID NO: 2750 - protein, 40 aa, Artificial Sequence
  Description of Artificial Sequence: Synthetic polypeptide
MNGETSTKSLWVINSALRIKILCATYGNVNIRDIDKIYVR

SEQ ID NO: 2751 - protein, 40 aa, Artificial Sequence
  Description of Artificial Sequence: Synthetic polypeptide
NGETSTKSLWVINSALRIKILCATYGNVNIRDIDKIYVRT

SEQ ID NO: 2752 - protein, 40 aa, Artificial Sequence
  Description of Artificial Sequence: Synthetic polypeptide
GETSTKSLWVINSALRIKILCATYGNVNIRDIDKIYVRTG

SEQ ID NO: 2753 - protein, 40 aa, Artificial Sequence
  Description of Artificial Sequence: Synthetic polypeptide
TSTKSLWVINSALRIKILCATYGNVNIRDIDKIYVRTGIY

SEQ ID NO: 2754 - protein, 40 aa, Artificial Sequence
  Description of Artificial Sequence: Synthetic polypeptide
TKSLWVINSALRIKILCATYGNVNIRDIDKIYVRTGIYHG

SEQ ID NO: 2755 - protein, 40 aa, Artificial Sequence
  Description of Artificial Sequence: Synthetic polypeptide
INSALRIKILCATYGNVNIRDIDKIYVRTGIYHGGEPLCD

SEQ ID NO: 2756 - protein, 40 aa, Artificial Sequence
  Description of Artificial Sequence: Synthetic polypeptide
KSLWVINSALRIKILCATYMNVNIRDIDKIYVRTGIYHGG

SEQ ID NO: 2757 - protein, 40 aa, Artificial Sequence
  Description of Artificial Sequence: Synthetic polypeptide
SLWVINSALRIKILCATYMNVNIRDIDKIYVRTGIYHGGE

SEQ ID NO: 2758 - protein, 40 aa, Artificial Sequence
  Description of Artificial Sequence: Synthetic polypeptide
NSALRIKILCATYMNVNIRDIDKIYVRTGIYHGGEPLCDN

SEQ ID NO: 2759 - protein, 40 aa, Artificial Sequence
  Description of Artificial Sequence: Synthetic polypeptide
ALRIKILCATYMNVNIRDIDKIYVRTGIYHGGEPLCDNVN

SEQ ID NO: 2760 - protein, 40 aa, Artificial Sequence
  Description of Artificial Sequence: Synthetic polypeptide
RIKILCATYMNVNIRDIDKIYVRTGIYHGGEPLCDNVNTQ

SEQ ID NO: 2761 - protein, 40 aa, Artificial Sequence
  Description of Artificial Sequence: Synthetic polypeptide
MNVNIRDIDKIYVRTGIYHGGEPLCDNVNTQRVPCSNPRW

SEQ ID NO: 2762 - protein, 40 aa, Artificial Sequence
  Description of Artificial Sequence: Synthetic polypeptide
TPYMNGETSTKSLWVINSALRIKILCATYVIVNIRDIDKI

SEQ ID NO: 2763 - protein, 40 aa, Artificial Sequence
  Description of Artificial Sequence: Synthetic polypeptide
GETSTKSLWVINSALRIKILCATYVIVNIRDIDKIYVRTG

SEQ ID NO: 2764 - protein, 40 aa, Artificial Sequence
  Description of Artificial Sequence: Synthetic polypeptide
TKSLWVINSALRIKILCATYVIVNIRDIDKIYVRTGIYHG

SEQ ID NO: 2765 - protein, 40 aa, Artificial Sequence
  Description of Artificial Sequence: Synthetic polypeptide
KSLWVINSALRIKILCATYVIVNIRDIDKIYVRTGIYHGG

SEQ ID NO: 2766 - protein, 40 aa, Artificial Sequence
  Description of Artificial Sequence: Synthetic polypeptide
ISTATPYMNGETSTKSLWVINSALRIKILCATYVYVNIRD

SEQ ID NO: 2767 - protein, 40 aa, Artificial Sequence
  Description of Artificial Sequence: Synthetic polypeptide
TATPYMNGETSTKSLWVINSALRIKILCATYVYVNIRDID

SEQ ID NO: 2768 - protein, 40 aa, Artificial Sequence
  Description of Artificial Sequence: Synthetic polypeptide
GETSTKSLWVINSALRIKILCATYVYVNIRDIDKIYVRTG

SEQ ID NO: 2769 - protein, 40 aa, Artificial Sequence
  Description of Artificial Sequence: Synthetic polypeptide
TKSLWVINSALRIKILCATYVYVNIRDIDKIYVRTGIYHG

SEQ ID NO: 2770 - protein, 40 aa, Artificial Sequence
  Description of Artificial Sequence: Synthetic polypeptide
INSALRIKILCATYVYVNIRDIDKIYVRTGIYHGGEPLCD

SEQ ID NO: 2771 - protein, 40 aa, Artificial Sequence
  Description of Artificial Sequence: Synthetic polypeptide
TDTLVSGKMALNLWPVPHGLEDLLNPIGVTGSNPNKETLC

SEQ ID NO: 2772 - protein, 40 aa, Artificial Sequence
  Description of Artificial Sequence: Synthetic polypeptide
MALNLWPVPHGLEDLLNPIGVTGSNPNKETLCLELEFDWF

SEQ ID NO: 2773 - protein, 40 aa, Artificial Sequence
  Description of Artificial Sequence: Synthetic polypeptide
LNLWPVPHGLEDLLNPIGVTGSNPNKETLCLELEFDWFSS

SEQ ID NO: 2774 - protein, 40 aa, Artificial Sequence
  Description of Artificial Sequence: Synthetic polypeptide
NLWPVPHGLEDLLNPIGVTGSNPNKETLCLELEFDWFSSV

SEQ ID NO: 2775 - protein, 40 aa, Artificial Sequence
  Description of Artificial Sequence: Synthetic polypeptide
LWPVPHGLEDLLNPIGVTGSNPNKETLCLELEFDWFSSVV

SEQ ID NO: 2776 - protein, 40 aa, Artificial Sequence
  Description of Artificial Sequence: Synthetic polypeptide
VPHGLEDLLNPIGVTGSNPNKETLCLELEFDWFSSVVKFP

SEQ ID NO: 2777 - protein, 40 aa, Artificial Sequence
  Description of Artificial Sequence: Synthetic polypeptide
PHGLEDLLNPIGVTGSNPNKETLCLELEFDWFSSVVKFPD

SEQ ID NO: 2778 - protein, 40 aa, Artificial Sequence
  Description of Artificial Sequence: Synthetic polypeptide
HGLEDLLNPIGVTGSNPNKETLCLELEFDWFSSVVKFPDM

SEQ ID NO: 2779 - protein, 40 aa, Artificial Sequence
  Description of Artificial Sequence: Synthetic polypeptide
GLEDLLNPIGVTGSNPNKETLCLELEFDWFSSVVKFPDMS

SEQ ID NO: 2780 - protein, 40 aa, Artificial Sequence
  Description of Artificial Sequence: Synthetic polypeptide
LEDLLNPIGVTGSNPNKETLCLELEFDWFSSVVKFPDMSV

SEQ ID NO: 2781 - protein, 40 aa, Artificial Sequence
  Description of Artificial Sequence: Synthetic polypeptide
GVTGSNPNKETLCLELEFDWFSSVVKFPDMSVIEEHANWS

SEQ ID NO: 2782 - protein, 40 aa, Artificial Sequence
  Description of Artificial Sequence: Synthetic polypeptide
VTGSNPNKETLCLELEFDWFSSVVKFPDMSVIEEHANWSV

SEQ ID NO: 2783 - protein, 40 aa, Artificial Sequence
  Description of Artificial Sequence: Synthetic polypeptide
NKETLCLELEFDWFSSVVKFPDMSVIEEHANWSVSREAGF

SEQ ID NO: 2784 - protein, 40 aa, Artificial Sequence
  Description of Artificial Sequence: Synthetic polypeptide
LSEITKQEKDFLWSHRHYCVTIPEILPKLLLSVKWNSRDE

SEQ ID NO: 2785 - protein, 40 aa, Artificial Sequence
  Description of Artificial Sequence: Synthetic polypeptide
EREKDFLWSHRHYCVTIPEILPKLLLSVKWNSRDEVAQMY

SEQ ID NO: 2786 - protein, 40 aa, Artificial Sequence
  Description of Artificial Sequence: Synthetic polypeptide
ERVPFVFTQDFLIVISKGAQECTKTREFERFQEMCYKAYL

SEQ ID NO: 2787 - protein, 40 aa, Artificial Sequence
  Description of Artificial Sequence: Synthetic polypeptide
PFVFTQDFLIVISKGAQECTKTREFERFQEMCYKAYLAIR

SEQ ID NO: 2788 - protein, 40 aa, Artificial Sequence
  Description of Artificial Sequence: Synthetic polypeptide
VFTQDFLIVISKGAQECTKTREFERFQEMCYKAYLAIRQH

SEQ ID NO: 2789 - protein, 40 aa, Artificial Sequence
  Description of Artificial Sequence: Synthetic polypeptide
DASTKMHGDYTLTLRKWGNNKLIKIFHRDGKYGFSDPLTF

SEQ ID NO: 2790 - protein, 40 aa, Artificial Sequence
  Description of Artificial Sequence: Synthetic polypeptide
STKMHGDYTLTLRKWGNNKLIKIFHRDGKYGFSDPLTFSS

SEQ ID NO: 2791 - protein, 40 aa, Artificial Sequence
  Description of Artificial Sequence: Synthetic polypeptide
KMHGDYTLTLRKWGNNKLIKIFHRDGKYGFSDPLTFSSVV

SEQ ID NO: 2792 - protein, 40 aa, Artificial Sequence
  Description of Artificial Sequence: Synthetic polypeptide
LRKWGNNKLIKIFHRDGKYGFSDPLTFSSVVELINHYRNE

SEQ ID NO: 2793 - protein, 40 aa, Artificial Sequence
  Description of Artificial Sequence: Synthetic polypeptide
KMHGDYTLTLRKGRNNKLIKIFHRDGKYGFSDPLTFSSVV

SEQ ID NO: 2794 - protein, 40 aa, Artificial Sequence
  Description of Artificial Sequence: Synthetic polypeptide
YTLTLRKGRNNKLIKIFHRDGKYGFSDPLTFSSVVELINH

SEQ ID NO: 2795 - protein, 40 aa, Artificial Sequence
  Description of Artificial Sequence: Synthetic polypeptide
TLTLRKGRNNKLIKIFHRDGKYGFSDPLTFSSVVELINHY

SEQ ID NO: 2796 - protein, 40 aa, Artificial Sequence
  Description of Artificial Sequence: Synthetic polypeptide
LTLRKGRNNKLIKIFHRDGKYGFSDPLTFSSVVELINHYR

SEQ ID NO: 2797 - protein, 40 aa, Artificial Sequence
  Description of Artificial Sequence: Synthetic polypeptide
TLRKGRNNKLIKIFHRDGKYGFSDPLTFSSVVELINHYRN

SEQ ID NO: 2798 - protein, 40 aa, Artificial Sequence
  Description of Artificial Sequence: Synthetic polypeptide
RKGRNNKLIKIFHRDGKYGFSDPLTFSSVVELINHYRNES

SEQ ID NO: 2799 - protein, 40 aa, Artificial Sequence
  Description of Artificial Sequence: Synthetic polypeptide
RNNKLIKIFHRDGKYGFSDPLTFSSVVELINHYRNESLAQ

SEQ ID NO: 2800 - protein, 40 aa, Artificial Sequence
  Description of Artificial Sequence: Synthetic polypeptide
DASTKMHGDYTLTLRKGGNNELIKIFHRDGKYGFSDPLTF

SEQ ID NO: 2801 - protein, 40 aa, Artificial Sequence
  Description of Artificial Sequence: Synthetic polypeptide
TLTLRKGGNNELIKIFHRDGKYGFSDPLTFSSVVELINHY

SEQ ID NO: 2802 - protein, 40 aa, Artificial Sequence
  Description of Artificial Sequence: Synthetic polypeptide
TLRKGGNNELIKIFHRDGKYGFSDPLTFSSVVELINHYRN

SEQ ID NO: 2803 - protein, 40 aa, Artificial Sequence
  Description of Artificial Sequence: Synthetic polypeptide
KGGNNELIKIFHRDGKYGFSDPLTFSSVVELINHYRNESL

SEQ ID NO: 2804 - protein, 40 aa, Artificial Sequence
  Description of Artificial Sequence: Synthetic polypeptide
STKMHGDYTLTLRKGGNNNLIKIFHRDGKYGFSDPLTFSS

SEQ ID NO: 2805 - protein, 40 aa, Artificial Sequence
  Description of Artificial Sequence: Synthetic polypeptide
TKMHGDYTLTLRKGGNNNLIKIFHRDGKYGFSDPLTFSSV

SEQ ID NO: 2806 - protein, 40 aa, Artificial Sequence
  Description of Artificial Sequence: Synthetic polypeptide
DYTLTLRKGGNNNLIKIFHRDGKYGFSDPLTFSSVVELIN

SEQ ID NO: 2807 - protein, 40 aa, Artificial Sequence
  Description of Artificial Sequence: Synthetic polypeptide
YTLTLRKGGNNNLIKIFHRDGKYGFSDPLTFSSVVELINH

SEQ ID NO: 2808 - protein, 40 aa, Artificial Sequence
  Description of Artificial Sequence: Synthetic polypeptide
LTLRKGGNNNLIKIFHRDGKYGFSDPLTFSSVVELINHYR

SEQ ID NO: 2809 - protein, 40 aa, Artificial Sequence
  Description of Artificial Sequence: Synthetic polypeptide
TLRKGGNNNLIKIFHRDGKYGFSDPLTFSSVVELINHYRN

SEQ ID NO: 2810 - protein, 40 aa, Artificial Sequence
  Description of Artificial Sequence: Synthetic polypeptide
LRKGGNNNLIKIFHRDGKYGFSDPLTFSSVVELINHYRNE

SEQ ID NO: 2811 - protein, 40 aa, Artificial Sequence
  Description of Artificial Sequence: Synthetic polypeptide
RKGGNNNLIKIFHRDGKYGFSDPLTFSSVVELINHYRNES

SEQ ID NO: 2812 - protein, 40 aa, Artificial Sequence
  Description of Artificial Sequence: Synthetic polypeptide
KGGNNNLIKIFHRDGKYGFSDPLTFSSVVELINHYRNESL

SEQ ID NO: 2813 - protein, 40 aa, Artificial Sequence
  Description of Artificial Sequence: Synthetic polypeptide
GGNNNLIKIFHRDGKYGFSDPLTFSSVVELINHYRNESLA

SEQ ID NO: 2814 - protein, 40 aa, Artificial Sequence
  Description of Artificial Sequence: Synthetic polypeptide
NYDKLKSRISEIIDSRRRLEEDLKKQAAEYPEIDKRMNSI

SEQ ID NO: 2815 - protein, 40 aa, Artificial Sequence
  Description of Artificial Sequence: Synthetic polypeptide
QRIMHNYDKLKSRISEIIDSRRRLEEDLKKQAAEYREIGK

SEQ ID NO: 2816 - protein, 40 aa, Artificial Sequence
  Description of Artificial Sequence: Synthetic polypeptide
NYDKLKSRISEIIDSRRRLEEDLKKQAAEYREIGKRMNSI

SEQ ID NO: 2817 - protein, 40 aa, Artificial Sequence
  Description of Artificial Sequence: Synthetic polypeptide
KSRISEIIDSRRRLEEDLKKQAAEYREIGKRMNSIKPDLI

SEQ ID NO: 2818 - protein, 40 aa, Artificial Sequence
  Description of Artificial Sequence: Synthetic polypeptide
RISEIIDSRRRLEEDLKKQAAEYREIYKRMNSIKPDLIQL

SEQ ID NO: 2819 - protein, 40 aa, Artificial Sequence
  Description of Artificial Sequence: Synthetic polypeptide
RRLEEDLKKQAAEYREIYKRMNSIKPDLIQLRKTRDQYLM

SEQ ID NO: 2820 - protein, 40 aa, Artificial Sequence
  Description of Artificial Sequence: Synthetic polypeptide
SRISEIIDSRRRLEEDLKKQAAEYREIDKRMNRIKPDLIQ

SEQ ID NO: 2821 - protein, 40 aa, Artificial Sequence
  Description of Artificial Sequence: Synthetic polypeptide
EIIDSRRRLEEDLKKQAAEYREIDKRMNRIKPDLIQLRKT

SEQ ID NO: 2822 - protein, 40 aa, Artificial Sequence
  Description of Artificial Sequence: Synthetic polypeptide
REIDKRMNRIKPDLIQLRKTRDQYLMWLTQKGVRQKKLNE

SEQ ID NO: 2823 - protein, 40 aa, Artificial Sequence
  Description of Artificial Sequence: Synthetic polypeptide
KLKSRISEIIDSRRRLEEDLKKQAAEYREIDKRMNSIKTD

SEQ ID NO: 2824 - protein, 40 aa, Artificial Sequence
  Description of Artificial Sequence: Synthetic polypeptide
RISEIIDSRRRLEEDLKKQAAEYREIDKRMNSIKTDLIQL

SEQ ID NO: 2825 - protein, 40 aa, Artificial Sequence
  Description of Artificial Sequence: Synthetic polypeptide
RRRLEEDLKKQAAEYREIDKRMNSIKTDLIQLRKTRDQYL

SEQ ID NO: 2826 - protein, 40 aa, Artificial Sequence
  Description of Artificial Sequence: Synthetic polypeptide
VSSAVKAELRQYFRNLCSDDTPMVWRAAASKLGEFAKVLE

SEQ ID NO: 2827 - protein, 40 aa, Artificial Sequence
  Description of Artificial Sequence: Synthetic polypeptide
QGFWEEFETLQQQECKLLYSRKEGQRQENKNKNRCKNILP

SEQ ID NO: 2828 - protein, 40 aa, Artificial Sequence
  Description of Artificial Sequence: Synthetic polypeptide
LQQQECKLLYSRKEGQRQENKNKNRCKNILPFDHTRVVLH

SEQ ID NO: 2829 - protein, 40 aa, Artificial Sequence
  Description of Artificial Sequence: Synthetic polypeptide
QECKLLYSRKEGQRQENKNKNRCKNILPFDHTRVVLHDGD

SEQ ID NO: 2830 - protein, 40 aa, Artificial Sequence
  Description of Artificial Sequence: Synthetic polypeptide
CKLLYSRKEGQRQENKNKNRCKNILPFDHTRVVLHDGDPN

SEQ ID NO: 2831 - protein, 40 aa, Artificial Sequence
  Description of Artificial Sequence: Synthetic polypeptide
KLLYSRKEGQRQENKNKNRCKNILPFDHTRVVLHDGDPNE

SEQ ID NO: 2832 - protein, 40 aa, Artificial Sequence
  Description of Artificial Sequence: Synthetic polypeptide
LYSRKEGQRQENKNKNRCKNILPFDHTRVVLHDGDPNEPV

SEQ ID NO: 2833 - protein, 40 aa, Artificial Sequence
  Description of Artificial Sequence: Synthetic polypeptide
KNKNRYKNMLPFDHTRVVLHDGDPNEPVSDYINANIIMPE

SEQ ID NO: 2834 - protein, 40 aa, Artificial Sequence
  Description of Artificial Sequence: Synthetic polypeptide
GRTGTFIVIDILIDIIREKGVDCDIDVPKTIQMVRSQRSV

SEQ ID NO: 2835 - protein, 40 aa, Artificial Sequence
  Description of Artificial Sequence: Synthetic polypeptide
TGTFIVIDILIDIIREKGVDCDIDVPKTIQMVRSQRSVMV

SEQ ID NO: 2836 - protein, 40 aa, Artificial Sequence
  Description of Artificial Sequence: Synthetic polypeptide
IVIDILIDIIREKGVDCDIDVPKTIQMVRSQRSVMVQTEA

SEQ ID NO: 2837 - protein, 40 aa, Artificial Sequence
  Description of Artificial Sequence: Synthetic polypeptide
VIDILIDIIREKGVDCDIDVPKTIQMVRSQRSVMVQTEAQ

SEQ ID NO: 2838 - protein, 40 aa, Artificial Sequence
  Description of Artificial Sequence: Synthetic polypeptide
DCDIDVPKTIQMVRSQRSVMVQTEAQYRFIYMAVQHYIET

SEQ ID NO: 2839 - protein, 40 aa, Artificial Sequence
  Description of Artificial Sequence: Synthetic polypeptide
RSVMVQTEAQYRFIYMAVQHYIETLQRRIEEEQKSKRKGH

SEQ ID NO: 2840 - protein, 40 aa, Artificial Sequence
  Description of Artificial Sequence: Synthetic polypeptide
VQTEAHYRFIYMAVQHYIETLQRRIEEEQKSKRKGHEYTN

SEQ ID NO: 2841 - protein, 40 aa, Artificial Sequence
  Description of Artificial Sequence: Synthetic polypeptide
VGKTCLLISYTTNAFLGEYIPTVFDNYSANVMVDGKPVNL

SEQ ID NO: 2842 - protein, 40 aa, Artificial Sequence
  Description of Artificial Sequence: Synthetic polypeptide
DGKPVNLGLWDTAGQEDYDRLHPLSYPQTVGETYGKDITS

SEQ ID NO: 2843 - protein, 40 aa, Artificial Sequence
  Description of Artificial Sequence: Synthetic polypeptide
GKPVNLGLWDTAGQEDYDRLHPLSYPQTVGETYGKDITSR

SEQ ID NO: 2844 - protein, 40 aa, Artificial Sequence
  Description of Artificial Sequence: Synthetic polypeptide
EDYDRLHPLSYPQTVGETYGKDITSRGKDKPIADVFLICF

SEQ ID NO: 2845 - protein, 40 aa, Artificial Sequence
  Description of Artificial Sequence: Synthetic polypeptide
DYDRLHPLSYPQTVGETYGKDITSRGKDKPIADVFLICFS

SEQ ID NO: 2846 - protein, 40 aa, Artificial Sequence
  Description of Artificial Sequence: Synthetic polypeptide
FDFYKVIESFIKAEGNLTREMIKHLERCEHRIMESLASLS

SEQ ID NO: 2847 - protein, 40 aa, Artificial Sequence
  Description of Artificial Sequence: Synthetic polypeptide
DFYKVIESFIKAEGNLTREMIKHLERCEHRIMESLASLSD

SEQ ID NO: 2848 - protein, 40 aa, Artificial Sequence
  Description of Artificial Sequence: Synthetic polypeptide
FYKVIESFIKAEGNLTREMIKHLERCEHRIMESLASLSDS

SEQ ID NO: 2849 - protein, 40 aa, Artificial Sequence
  Description of Artificial Sequence: Synthetic polypeptide
KVIESFIKAEGNLTREMIKHLERCEHRIMESLASLSDSPL

SEQ ID NO: 2850 - protein, 40 aa, Artificial Sequence
  Description of Artificial Sequence: Synthetic polypeptide
VIESFIKAEGNLTREMIKHLERCEHRIMESLASLSDSPLF

SEQ ID NO: 2851 - protein, 40 aa, Artificial Sequence
  Description of Artificial Sequence: Synthetic polypeptide
IESFIKAEGNLTREMIKHLERCEHRIMESLASLSDSPLFD

SEQ ID NO: 2852 - protein, 40 aa, Artificial Sequence
  Description of Artificial Sequence: Synthetic polypeptide
ESFIKAEGNLTREMIKHLERCEHRIMESLASLSDSPLFDL

SEQ ID NO: 2853 - protein, 40 aa, Artificial Sequence
  Description of Artificial Sequence: Synthetic polypeptide
KAEGNLTREMIKHLERCEHRIMESLASLSDSPLFDLIKQS

SEQ ID NO: 2854 - protein, 40 aa, Artificial Sequence
  Description of Artificial Sequence: Synthetic polypeptide
AEGNLTREMIKHLERCEHRIMESLASLSDSPLFDLIKQSK

SEQ ID NO: 2855 - protein, 40 aa, Artificial Sequence
  Description of Artificial Sequence: Synthetic polypeptide
NLTREMIKHLERCEHRIMESLASLSDSPLFDLIKQSKDRE

SEQ ID NO: 2856 - protein, 40 aa, Artificial Sequence
  Description of Artificial Sequence: Synthetic polypeptide
LTREMIKHLERCEHRIMESLASLSDSPLFDLIKQSKDREG

SEQ ID NO: 2857 - protein, 40 aa, Artificial Sequence
  Description of Artificial Sequence: Synthetic polypeptide
IENTFTKLITVNGQEYHLQLVVTAGQDEYSIFPQTYSIDI

SEQ ID NO: 2858 - protein, 40 aa, Artificial Sequence
  Description of Artificial Sequence: Synthetic polypeptide
ENTFTKLITVNGQEYHLQLVVTAGQDEYSIFPQTYSIDIN

SEQ ID NO: 2859 - protein, 40 aa, Artificial Sequence
  Description of Artificial Sequence: Synthetic polypeptide
GAFGYMECSTKTKDGVREVFEMATRAALQARRGKKKSGCL

SEQ ID NO: 2860 - protein, 40 aa, Artificial Sequence
  Description of Artificial Sequence: Synthetic polypeptide
GAFGYMECSVKTKDGVREVFEMATRAALQARRGKKKSGCL

SEQ ID NO: 2861 - protein, 40 aa, Artificial Sequence
  Description of Artificial Sequence: Synthetic polypeptide
ACGKTCLLIVFSKDQFPEVYVPTVFENCVADIEVDGKQVE

SEQ ID NO: 2862 - protein, 40 aa, Artificial Sequence
  Description of Artificial Sequence: Synthetic polypeptide
KTCLLIVFSKDQFPEVYVPTVFENCVADIEVDGKQVELAL

SEQ ID NO: 2863 - protein, 40 aa, Artificial Sequence
  Description of Artificial Sequence: Synthetic polypeptide
VPTVFENCVADIEVDGKQVELALWDTAGQEDYDRLRPLSY

SEQ ID NO: 2864 - protein, 40 aa, Artificial Sequence
  Description of Artificial Sequence: Synthetic polypeptide
NYVADIKVDGKQVELALWDTAGQEDYDRLRPLSYPDTDVI

SEQ ID NO: 2865 - protein, 40 aa, Artificial Sequence
  Description of Artificial Sequence: Synthetic polypeptide
VELALWGTAGQEDYDRLRPLSYPDTDVILMCFSIDSPDSL

SEQ ID NO: 2866 - protein, 40 aa, Artificial Sequence
  Description of Artificial Sequence: Synthetic polypeptide
FENYVADIEVDGKQVELALWYTAGQEDYDRLRPLSYPDTD

SEQ ID NO: 2867 - protein, 40 aa, Artificial Sequence
  Description of Artificial Sequence: Synthetic polypeptide
DIEVDGKQVELALWYTAGQEDYDRLRPLSYPDTDVILMCF

SEQ ID NO: 2868 - protein, 40 aa, Artificial Sequence
  Description of Artificial Sequence: Synthetic polypeptide
KDQFPEVYVPTVFENYVADIEVDGKQVELALWDKAGQEDY

SEQ ID NO: 2869 - protein, 40 aa, Artificial Sequence
  Description of Artificial Sequence: Synthetic polypeptide
NYVADIEVDGKQVELALWDKAGQEDYDRLRPLSYPDTDVI

SEQ ID NO: 2870 - protein, 40 aa, Artificial Sequence
  Description of Artificial Sequence: Synthetic polypeptide
VFSKDQFPEVYVPTVFENYVADIEVDGKQVELALWDTAGK

SEQ ID NO: 2871 - protein, 40 aa, Artificial Sequence
  Description of Artificial Sequence: Synthetic polypeptide
FPEVYVPTVFENYVADIEVDGKQVELALWDTAGKEDYDRL

SEQ ID NO: 2872 - protein, 40 aa, Artificial Sequence
  Description of Artificial Sequence: Synthetic polypeptide
LALWDTAGQEDYDRLSPLSYPDTDVILMCFSIDSPDSLEN

SEQ ID NO: 2873 - protein, 40 aa, Artificial Sequence
  Description of Artificial Sequence: Synthetic polypeptide
HPGELVRTDSPNFLCSVLPTHWRCNNTLPIAFKVVALGDV

SEQ ID NO: 2874 - protein, 40 aa, Artificial Sequence
  Description of Artificial Sequence: Synthetic polypeptide
LLMIECSSRCPNGDYCSNRQFQRKQHADVEVILTEKKGWG

SEQ ID NO: 2875 - protein, 40 aa, Artificial Sequence
  Description of Artificial Sequence: Synthetic polypeptide
KEFKARVKEYARNKNIHYYFMALKNDEIIDATQKGNCSCF

SEQ ID NO: 2876 - protein, 40 aa, Artificial Sequence
  Description of Artificial Sequence: Synthetic polypeptide
IHYYFMALKNDEIIDATQKGNCSCFMNHSCEPNCETQKWT

SEQ ID NO: 2877 - protein, 40 aa, Artificial Sequence
  Description of Artificial Sequence: Synthetic polypeptide
DEIIDATQKGNCSCFMNHSCEPNCETQKWTVNGQLRVGFF

SEQ ID NO: 2878 - protein, 40 aa, Artificial Sequence
  Description of Artificial Sequence: Synthetic polypeptide
FKARVKEYARNKNIHYYFMALKNDEIIDATQKGNCSLFMN

SEQ ID NO: 2879 - protein, 40 aa, Artificial Sequence
  Description of Artificial Sequence: Synthetic polypeptide
CKSKKSWQARHTGIEIVQQIAILMGCAILPHLRSLVEIIE

SEQ ID NO: 2880 - protein, 40 aa, Artificial Sequence
  Description of Artificial Sequence: Synthetic polypeptide
QARHTGIEIVQQIAILMGCAILPHLRSLVEIIEHGLVDEQ

SEQ ID NO: 2881 - protein, 40 aa, Artificial Sequence
  Description of Artificial Sequence: Synthetic polypeptide
AIAALAEAATPYGIESFDSVLKPLWKGIRQHRGEGLAAFL

SEQ ID NO: 2882 - protein, 40 aa, Artificial Sequence
  Description of Artificial Sequence: Synthetic polypeptide
AEAATPYGIESFDSVLKPLWKGIRQHRGKGLAAVLKAIGY

SEQ ID NO: 2883 - protein, 40 aa, Artificial Sequence
  Description of Artificial Sequence: Synthetic polypeptide
EAATPYGIESFDSVLKPLWKGIRQHRGKGLAAVLKAIGYL

SEQ ID NO: 2884 - protein, 40 aa, Artificial Sequence
  Description of Artificial Sequence: Synthetic polypeptide
YRKMVMETIEKIMGNLGAADIDHKLEEQLIDGILYAFQGQ

SEQ ID NO: 2885 - protein, 40 aa, Artificial Sequence
  Description of Artificial Sequence: Synthetic polypeptide
RKMVMETIEKIMGNLGAADIDHKLEEQLIDGILYAFQGQT

SEQ ID NO: 2886 - protein, 40 aa, Artificial Sequence
  Description of Artificial Sequence: Synthetic polypeptide
ETIEKIMGNLGAADIDHKLEEQLIDGILYAFQGQTTEDSV

SEQ ID NO: 2887 - protein, 40 aa, Artificial Sequence
  Description of Artificial Sequence: Synthetic polypeptide
IEKIMGNLGAADIDHKLEEQLIDGILYAFQGQTTEDSVML

SEQ ID NO: 2888 - protein, 40 aa, Artificial Sequence
  Description of Artificial Sequence: Synthetic polypeptide
YRKMVMETIEKIMGNLGAADIDHKLEEQLIDGILYAFQKQ

SEQ ID NO: 2889 - protein, 40 aa, Artificial Sequence
  Description of Artificial Sequence: Synthetic polypeptide
TIEKIMGNLGAADIDHKLEEQLIDGILYAFQKQTTEDSVM

SEQ ID NO: 2890 - protein, 40 aa, Artificial Sequence
  Description of Artificial Sequence: Synthetic polypeptide
RKMVMETIEKIMGNLGAADIDHKLEEQLIDGILYAFQEPT

SEQ ID NO: 2891 - protein, 40 aa, Artificial Sequence
  Description of Artificial Sequence: Synthetic polypeptide
TIEKIMGNLGAADIDHKLEEQLIDGILYAFQEPTTEDSVM

SEQ ID NO: 2892 - protein, 40 aa, Artificial Sequence
  Description of Artificial Sequence: Synthetic polypeptide
YRRQTVTSTPCWIELHLNGPLQWLNKVLTQMGSPSVRCSS

SEQ ID NO: 2893 - protein, 40 aa, Artificial Sequence
  Description of Artificial Sequence: Synthetic polypeptide
WCSIAYFEMDVQVGETLKVPSSCPIVTVDGYVDPSGGDRF

SEQ ID NO: 2894 - protein, 40 aa, Artificial Sequence
  Description of Artificial Sequence: Synthetic polypeptide
IAYFEMDVQVGETLKVPSSCPIVTVDGYVDPSGGDRFCLG

SEQ ID NO: 2895 - protein, 40 aa, Artificial Sequence
  Description of Artificial Sequence: Synthetic polypeptide
SNHPAPEYWCSIAYFEMDVQVGETFKVPSSCPIVTVGGYV

SEQ ID NO: 2896 - protein, 40 aa, Artificial Sequence
  Description of Artificial Sequence: Synthetic polypeptide
HPAPEYWCSIAYFEMDVQVGETFKVPSSCPIVTVHGYVDP

SEQ ID NO: 2897 - protein, 40 aa, Artificial Sequence
  Description of Artificial Sequence: Synthetic polypeptide
PAPEYWCSIAYFEMDVQVGETFKVPSSCPIVTVHGYVDPS

SEQ ID NO: 2898 - protein, 40 aa, Artificial Sequence
  Description of Artificial Sequence: Synthetic polypeptide
IAYFEMDVQVGETFKVPSSCPIVTVDRYVDPSGGDRFCLG

SEQ ID NO: 2899 - protein, 40 aa, Artificial Sequence
  Description of Artificial Sequence: Synthetic polypeptide
PEYWCSIAYFEMDVQVGETFKVPSSCPIVTVDVYVDPSGG

SEQ ID NO: 2900 - protein, 40 aa, Artificial Sequence
  Description of Artificial Sequence: Synthetic polypeptide
IAYFEMDVQVGETFKVPSSCPIVTVDVYVDPSGGDRFCLG

SEQ ID NO: 2901 - protein, 40 aa, Artificial Sequence
  Description of Artificial Sequence: Synthetic polypeptide
PAPEYWCSIAYFEMDVQVGETFKVPSSCPIVTVDGCVDPS

SEQ ID NO: 2902 - protein, 40 aa, Artificial Sequence
  Description of Artificial Sequence: Synthetic polypeptide
PEYWCSIAYFEMDVQVGETFKVPSSCPIVTVDGCVDPSGG

SEQ ID NO: 2903 - protein, 40 aa, Artificial Sequence
  Description of Artificial Sequence: Synthetic polypeptide
AYFEMDVQVGETFKVPSSCPIVTVDGCVDPSGGDRFCLGQ

SEQ ID NO: 2904 - protein, 40 aa, Artificial Sequence
  Description of Artificial Sequence: Synthetic polypeptide
YWCSIAYFEMDVQVGETFKVPSSCPIVTVDGYVYPSGGDR

SEQ ID NO: 2905 - protein, 40 aa, Artificial Sequence
  Description of Artificial Sequence: Synthetic polypeptide
SIAYFEMDVQVGETFKVPSSCPIVTVDGYVYPSGGDRFCL

SEQ ID NO: 2906 - protein, 40 aa, Artificial Sequence
  Description of Artificial Sequence: Synthetic polypeptide
AYFEMDVQVGETFKVPSSCPIVTVDGYVDLSGGDRFCLGQ

SEQ ID NO: 2907 - protein, 40 aa, Artificial Sequence
  Description of Artificial Sequence: Synthetic polypeptide
WCSIAYFEMDVQVGETFKVPSSCPIVTVDGYVDPSGGDCF

SEQ ID NO: 2908 - protein, 40 aa, Artificial Sequence
  Description of Artificial Sequence: Synthetic polypeptide
IAYFEMDVQVGETFKVPSSCPIVTVDGYVDPSGGDRFCLR

SEQ ID NO: 2909 - protein, 40 aa, Artificial Sequence
  Description of Artificial Sequence: Synthetic polypeptide
FEMDVQVGETFKVPSSCPIVTVDGYVDPSGGDRFCLGQLC

SEQ ID NO: 2910 - protein, 40 aa, Artificial Sequence
  Description of Artificial Sequence: Synthetic polypeptide
HIGKGVQLECKGEGDVWVRCLSDHVVFVQSYYLDREAGRA

SEQ ID NO: 2911 - protein, 40 aa, Artificial Sequence
  Description of Artificial Sequence: Synthetic polypeptide
VVFVQSYYLDREAGRAPGDAVHKIYPSAYIKVFDLRQCHR

SEQ ID NO: 2912 - protein, 40 aa, Artificial Sequence
  Description of Artificial Sequence: Synthetic polypeptide
TKAMESQRAYRFVQGKDGGFKKFIRRDFLLDEANGLLPDD

SEQ ID NO: 2913 - protein, 40 aa, Artificial Sequence
  Description of Artificial Sequence: Synthetic polypeptide
NLLLVSCPKSEVRAKFKFSILNAKGEETKAMESQRAYRFV

SEQ ID NO: 2914 - protein, 40 aa, Artificial Sequence
  Description of Artificial Sequence: Synthetic polypeptide
PAPSWPLSSSVPSQKTYQCSYGFRLGFLHSGTAKSVTCTY

SEQ ID NO: 2915 - protein, 40 aa, Artificial Sequence
  Description of Artificial Sequence: Synthetic polypeptide
TPAAPAPAPSWPLSSSVPSQKTYQVSYGFRLGFLHSGTAK

SEQ ID NO: 2916 - protein, 40 aa, Artificial Sequence
  Description of Artificial Sequence: Synthetic polypeptide
SWPLSSSVPSQKTYQVSYGFRLGFLHSGTAKSVTCTYSPA

SEQ ID NO: 2917 - protein, 40 aa, Artificial Sequence
  Description of Artificial Sequence: Synthetic polypeptide
PTPAAPAPAPSWPLSSSVPSQKTYQGSYGFPLGFLHSGTA

SEQ ID NO: 2918 - protein, 40 aa, Artificial Sequence
  Description of Artificial Sequence: Synthetic polypeptide
AAPAPAPSWPLSSSVPSQKTYQGSYGFRRGFLHSGTAKSV

SEQ ID NO: 2919 - protein, 40 aa, Artificial Sequence
  Description of Artificial Sequence: Synthetic polypeptide
PAPAPSWPLSSSVPSQKTYQGSYGFRRGFLHSGTAKSVTC

SEQ ID NO: 2920 - protein, 40 aa, Artificial Sequence
  Description of Artificial Sequence: Synthetic polypeptide
APTPAAPAPAPSWPLSSSVPSQKTYQGSYGFRLGVLHSGT

SEQ ID NO: 2921 - protein, 40 aa, Artificial Sequence
  Description of Artificial Sequence: Synthetic polypeptide
AAPAPAPSWPLSSSVPSQKTYQGSYGFRLGFLHSGTAKYV

SEQ ID NO: 2922 - protein, 40 aa, Artificial Sequence
  Description of Artificial Sequence: Synthetic polypeptide
PSQKTYQGSYGFRLGFLHSGTAKSVTCTYSPARNKMFCQL

SEQ ID NO: 2923 - protein, 40 aa, Artificial Sequence
  Description of Artificial Sequence: Synthetic polypeptide
SVPSQKTYQGSYGFRLGFLHSGTAKSVTCTYSPAVNKMFC

SEQ ID NO: 2924 - protein, 40 aa, Artificial Sequence
  Description of Artificial Sequence: Synthetic polypeptide
TYSPALNKMFCQQAKTCPVQLWVDSTPPPGTRVRAMAIYK

SEQ ID NO: 2925 - protein, 40 aa, Artificial Sequence
  Description of Artificial Sequence: Synthetic polypeptide
YGFRLGFLHSGTAKSVTCTYSPALNKMFCQLAKTCLVQLW

SEQ ID NO: 2926 - protein, 40 aa, Artificial Sequence
  Description of Artificial Sequence: Synthetic polypeptide
RAMAIYEQSQHMTEVVRRCPHHERCSDSDGLAPPQHLIRV

SEQ ID NO: 2927 - protein, 40 aa, Artificial Sequence
  Description of Artificial Sequence: Synthetic polypeptide
VQLWVDSTPPPGTRVRAMAIYKQSQHMTEVGRRCPHHERC

SEQ ID NO: 2928 - protein, 40 aa, Artificial Sequence
  Description of Artificial Sequence: Synthetic polypeptide
YKQSQHMTEVVRRFPHHERCSDSDGLAPPQHLIRVEGNLR

SEQ ID NO: 2929 - protein, 40 aa, Artificial Sequence
  Description of Artificial Sequence: Synthetic polypeptide
QHMTEVVRRFPHHERCSDSDGLAPPQHLIRVEGNLRVEYL

SEQ ID NO: 2930 - protein, 40 aa, Artificial Sequence
  Description of Artificial Sequence: Synthetic polypeptide
PVQLWVDSTPPPGTRVRAMAIYKQSQHMTEVVRRCPHRER

SEQ ID NO: 2931 - protein, 40 aa, Artificial Sequence
  Description of Artificial Sequence: Synthetic polypeptide
YKQSQHMTEVVRRCPHHERCSDSDGLALPQHLIRVEGNLR

SEQ ID NO: 2932 - protein, 40 aa, Artificial Sequence
  Description of Artificial Sequence: Synthetic polypeptide
SDSDGLAPPQHHIRVEGNLRVEYLDDRNTFRHSVVVPYEP

SEQ ID NO: 2933 - protein, 40 aa, Artificial Sequence
  Description of Artificial Sequence: Synthetic polypeptide
QHMTEVVRRCPHHERCSDSDGLAPPQHLFRVEGNLRVEYL

SEQ ID NO: 2934 - protein, 40 aa, Artificial Sequence
  Description of Artificial Sequence: Synthetic polypeptide
SDGLAPPQHLIRGEGNLRVEYLDDRNTFRHSVVVPYEPPE

SEQ ID NO: 2935 - protein, 40 aa, Artificial Sequence
  Description of Artificial Sequence: Synthetic polypeptide
QHLIRVEGNLRVESLDDRNTFRHSVVVPYEPPEVGSDCTT

SEQ ID NO: 2936 - protein, 40 aa, Artificial Sequence
  Description of Artificial Sequence: Synthetic polypeptide
CSDSDGLAPPQHLIRVEGNLRVEYLDDRNIFRHSVVVPYE

SEQ ID NO: 2937 - protein, 40 aa, Artificial Sequence
  Description of Artificial Sequence: Synthetic polypeptide
APPQHLIRVEGNLRVEYLDDRNIFRHSVVVPYEPPEVGSD

SEQ ID NO: 2938 - protein, 40 aa, Artificial Sequence
  Description of Artificial Sequence: Synthetic polypeptide
SDGLAPPQHLIRVEGNLRVEYLDDRNTFLHSVVVPYEPPE

SEQ ID NO: 2939 - protein, 40 aa, Artificial Sequence
  Description of Artificial Sequence: Synthetic polypeptide
SSCMSGMNRRPILTIITLEDSSGNLLGRNSFEVRVCACPG

SEQ ID NO: 2940 - protein, 40 aa, Artificial Sequence
  Description of Artificial Sequence: Synthetic polypeptide
CMGGMNRRPILTIITLEDSSGNLLGRNSFEVRVCACPGRH

SEQ ID NO: 2941 - protein, 40 aa, Artificial Sequence
  Description of Artificial Sequence: Synthetic polypeptide
GMNRRPILTIITLEDSSGNLLGRNSFEVRVCACPGRDRRP

SEQ ID NO: 2942 - protein, 40 aa, Artificial Sequence
  Description of Artificial Sequence: Synthetic polypeptide
SFEVRVCACPGRDRRTKEENLRKKGEPHHELPPGSTKRAL

SEQ ID NO: 2943 - protein, 40 aa, Artificial Sequence
  Description of Artificial Sequence: Synthetic polypeptide
KPLDGEYFTLQIRGRERFEMFRELNEASELKDAQAGKEPG

SEQ ID NO: 2944 - protein, 40 aa, Artificial Sequence
  Description of Artificial Sequence: Synthetic polypeptide
TLPPGTGRRIHSYRGNLWLFRDAGTHDGLLVNQTELFVPS

SEQ ID NO: 2945 - protein, 40 aa, Artificial Sequence
  Description of Artificial Sequence: Synthetic polypeptide
GTHDGLLVNQTELFVPSLNVDGQPIFANITLPVYTLKEQC

SEQ ID NO: 2946 - protein, 40 aa, Artificial Sequence
  Description of Artificial Sequence: Synthetic polypeptide
GLLVNQTELFVPSLNVDGQPIFANITLPVYTLKERCLQDV

SEQ ID NO: 2947 - protein, 40 aa, Artificial Sequence
  Description of Artificial Sequence: Synthetic polypeptide
YTLKERCLQVVRSLVKPENYRRPDIVRSLYEDLEDHPNVQ

SEQ ID NO: 2948 - protein, 40 aa, Artificial Sequence
  Description of Artificial Sequence: Synthetic polypeptide
TLPVYTLKERCLQVVRSLVKPENYRRLDIVRSPYEDLEDH

SEQ ID NO: 2949 - protein, 40 aa, Artificial Sequence
  Description of Artificial Sequence: Synthetic polypeptide
WEIPDGQITVGQRIVSGSFGTVYKGKWHGDVAVKMLNVTA

SEQ ID NO: 2950 - protein, 40 aa, Artificial Sequence
  Description of Artificial Sequence: Synthetic polypeptide
FEMIKLIDIARQTAQGMDYLHAKSIIHKDLKSNNIFLHED

SEQ ID NO: 2951 - protein, 40 aa, Artificial Sequence
  Description of Artificial Sequence: Synthetic polypeptide
MIKLIDIARQTAQGMDYLHAKSIIHKDLKSNNIFLHEDLT

SEQ ID NO: 2952 - protein, 40 aa, Artificial Sequence
  Description of Artificial Sequence: Synthetic polypeptide
DIARQTAQGMDYLHAKSIIHKDLKSNNIFLHEDLTVKIGD

SEQ ID NO: 2953 - protein, 40 aa, Artificial Sequence
  Description of Artificial Sequence: Synthetic polypeptide
DYLHAKSIIHRDLKSNIIFLHEDLTVKIGDFGLATVKSRW

SEQ ID NO: 2954 - protein, 40 aa, Artificial Sequence
  Description of Artificial Sequence: Synthetic polypeptide
AKSIIHRDLKSNIIFLHEDLTVKIGDFGLATVKSRWSGSH

SEQ ID NO: 2955 - protein, 40 aa, Artificial Sequence
  Description of Artificial Sequence: Synthetic polypeptide
SIIHRDLKSNIIFLHEDLTVKIGDFGLATVKSRWSGSHQF

SEQ ID NO: 2956 - protein, 40 aa, Artificial Sequence
  Description of Artificial Sequence: Synthetic polypeptide
IHRDLKSNIIFLHEDLTVKIGDFGLATVKSRWSGSHQFEQ

SEQ ID NO: 2957 - protein, 40 aa, Artificial Sequence
  Description of Artificial Sequence: Synthetic polypeptide
DLKSNIIFLHEDLTVKIGDFGLATVKSRWSGSHQFEQLSG

SEQ ID NO: 2958 - protein, 40 aa, Artificial Sequence
  Description of Artificial Sequence: Synthetic polypeptide
LKSNIIFLHEDLTVKIGDFGLATVKSRWSGSHQFEQLSGS

SEQ ID NO: 2959 - protein, 40 aa, Artificial Sequence
  Description of Artificial Sequence: Synthetic polypeptide
NIIFLHEDLTVKIGDFGLATVKSRWSGSHQFEQLSGSILW

SEQ ID NO: 2960 - protein, 40 aa, Artificial Sequence
  Description of Artificial Sequence: Synthetic polypeptide
IIFLHEDLTVKIGDFGLATVKSRWSGSHQFEQLSGSILWM

SEQ ID NO: 2961 - protein, 40 aa, Artificial Sequence
  Description of Artificial Sequence: Synthetic polypeptide
DIARQTAQGMDYLHAKSIIHRDLKSNNIFLHEDLTVKIGG

SEQ ID NO: 2962 - protein, 40 aa, Artificial Sequence
  Description of Artificial Sequence: Synthetic polypeptide
YLHAKSIIHRDLKSNNIFLHEDLTVKIGGFGLATVKSRWS

SEQ ID NO: 2963 - protein, 40 aa, Artificial Sequence
  Description of Artificial Sequence: Synthetic polypeptide
LHAKSIIHRDLKSNNIFLHEDLTVKIGGFGLATVKSRWSG

SEQ ID NO: 2964 - protein, 40 aa, Artificial Sequence
  Description of Artificial Sequence: Synthetic polypeptide
HAKSIIHRDLKSNNIFLHEDLTVKIGGFGLATVKSRWSGS

SEQ ID NO: 2965 - protein, 40 aa, Artificial Sequence
  Description of Artificial Sequence: Synthetic polypeptide
IFLHEDLTVKIGNFGLATVKSRWSGSHQFEQLSGSILWMA

SEQ ID NO: 2966 - protein, 40 aa, Artificial Sequence
  Description of Artificial Sequence: Synthetic polypeptide
EDLTVKIGNFGLATVKSRWSGSHQFEQLSGSILWMAPEVI

SEQ ID NO: 2967 - protein, 40 aa, Artificial Sequence
  Description of Artificial Sequence: Synthetic polypeptide
DLTVKIGNFGLATVKSRWSGSHQFEQLSGSILWMAPEVIR

SEQ ID NO: 2968 - protein, 40 aa, Artificial Sequence
  Description of Artificial Sequence: Synthetic polypeptide
LHAKSIIHRDLKSNNIFLHEDLTVKIGDFDLATVKSRWSG

SEQ ID NO: 2969 - protein, 40 aa, Artificial Sequence
  Description of Artificial Sequence: Synthetic polypeptide
HRDLKSNNIFLHEDLTVKIGDFDLATVKSRWSGSHQFEQL

SEQ ID NO: 2970 - protein, 40 aa, Artificial Sequence
  Description of Artificial Sequence: Synthetic polypeptide
NIFLHEDLTVKIGDFDLATVKSRWSGSHQFEQLSGSILWM

SEQ ID NO: 2971 - protein, 40 aa, Artificial Sequence
  Description of Artificial Sequence: Synthetic polypeptide
HAKSIIHRDLKSNNIFLHEDLTVKIGDFSLATVKSRWSGS

SEQ ID NO: 2972 - protein, 40 aa, Artificial Sequence
  Description of Artificial Sequence: Synthetic polypeptide
IFLHEDLTVKIGDFGQATVKSRWSGSHQFEQLSGSILWMA

SEQ ID NO: 2973 - protein, 40 aa, Artificial Sequence
  Description of Artificial Sequence: Synthetic polypeptide
HAKSIIHRDLKSNNIFLHEDLTVKIGDFGVATVKSRWSGS

SEQ ID NO: 2974 - protein, 40 aa, Artificial Sequence
  Description of Artificial Sequence: Synthetic polypeptide
NIFLHEDLTVKIGDFGVATVKSRWSGSHQFEQLSGSILWM

SEQ ID NO: 2975 - protein, 40 aa, Artificial Sequence
  Description of Artificial Sequence: Synthetic polypeptide
GQEAPIYELTSQFTGLKCPSLAGKPKVFFIQACQGDNYQK

SEQ ID NO: 2976 - protein, 40 aa, Artificial Sequence
  Description of Artificial Sequence: Synthetic polypeptide
ELTSQFTGLKCPSLAGKPKVFFIQACQGDNYQKGIPVETD

SEQ ID NO: 2977 - protein, 40 aa, Artificial Sequence
  Description of Artificial Sequence: Synthetic polypeptide
SQFTGLKCPSLAGKPKVFFIQACQGDNYQKGIPVETDSEE

SEQ ID NO: 2978 - protein, 40 aa, Artificial Sequence
  Description of Artificial Sequence: Synthetic polypeptide
GLKCPSLAGKPKVFFIQACQGDNYQKGIPVETDSEEQPYL

SEQ ID NO: 2979 - protein, 40 aa, Artificial Sequence
  Description of Artificial Sequence: Synthetic polypeptide
LKCPSLAGKPKVFFIQACQGDNYQKGIPVETDSEEQPYLE

SEQ ID NO: 2980 - protein, 40 aa, Artificial Sequence
  Description of Artificial Sequence: Synthetic polypeptide
KPKVFFIQACQGDNYQKGIPVETDSEEQPYLEMDLSSPQT

SEQ ID NO: 2981 - protein, 40 aa, Artificial Sequence
  Description of Artificial Sequence: Synthetic polypeptide
LKCPSLAGKPKVFFIQACQGDNYQGGIPVETDSEEQPYLE

SEQ ID NO: 2982 - protein, 40 aa, Artificial Sequence
  Description of Artificial Sequence: Synthetic polypeptide
KVTEPLDGERIATYTLFSHAVSSNGNAVEDPMEILITVTD

SEQ ID NO: 2983 - protein, 40 aa, Artificial Sequence
  Description of Artificial Sequence: Synthetic polypeptide
IIHRDLKPENVLLSSQEEDCLIKITDFGHSKILGETSLRR

SEQ ID NO: 2984 - protein, 40 aa, Artificial Sequence
  Description of Artificial Sequence: Synthetic polypeptide
LKPENVLLSSQEEDCLIKITDFGHSKILGETSLRRTLCGT

SEQ ID NO: 2985 - protein, 40 aa, Artificial Sequence
  Description of Artificial Sequence: Synthetic polypeptide
KPENVLLSSQEEDCLIKITDFGHSKILGETSLRRTLCGTP

SEQ ID NO: 2986 - protein, 40 aa, Artificial Sequence
  Description of Artificial Sequence: Synthetic polypeptide
LLSSQEEDCLIKITDFGHSKILGETSLRRTLCGTPTYLAP

SEQ ID NO: 2987 - protein, 40 aa, Artificial Sequence
  Description of Artificial Sequence: Synthetic polypeptide
LSSQEEDCLIKITDFGHSKILGETSLRRTLCGTPTYLAPE

SEQ ID NO: 2988 - protein, 40 aa, Artificial Sequence
  Description of Artificial Sequence: Synthetic polypeptide
SSQEEDCLIKITDFGHSKILGETSLRRTLCGTPTYLAPEV

SEQ ID NO: 2989 - protein, 40 aa, Artificial Sequence
  Description of Artificial Sequence: Synthetic polypeptide
ITDFGHSKILGETSLRRTLCGTPTYLAPEVLVSVGTAGYN

SEQ ID NO: 2990 - protein, 40 aa, Artificial Sequence
  Description of Artificial Sequence: Synthetic polypeptide
TDFGHSKILGETSLRRTLCGTPTYLAPEVLVSVGTAGYNR

SEQ ID NO: 2991 - protein, 40 aa, Artificial Sequence
  Description of Artificial Sequence: Synthetic polypeptide
GETSLRRTLCGTPTYLAPEVLVSVGTAGYNRAVDCWSLGV

SEQ ID NO: 2992 - protein, 40 aa, Artificial Sequence
  Description of Artificial Sequence: Synthetic polypeptide
KPENVLLSSQEEDCLIKITDFGHSKILGETSLMRTLCGTL

SEQ ID NO: 2993 - protein, 40 aa, Artificial Sequence
  Description of Artificial Sequence: Synthetic polypeptide
PENVLLSSQEEDCLIKITDFGHSKILGETSLMRTLCGTLT

SEQ ID NO: 2994 - protein, 40 aa, Artificial Sequence
  Description of Artificial Sequence: Synthetic polypeptide
SSQEEDCLIKITDFGHSKILGETSLMRTLCGTLTYLAPEV

SEQ ID NO: 2995 - protein, 40 aa, Artificial Sequence
  Description of Artificial Sequence: Synthetic polypeptide
TDFGHSKILGETSLMRTLCGTLTYLAPEVLVSVGTAGYNR

SEQ ID NO: 2996 - protein, 40 aa, Artificial Sequence
  Description of Artificial Sequence: Synthetic polypeptide
SKILGETSLMRTLCGTLTYLAPEVLVSVGTAGYNRAVDCW

SEQ ID NO: 2997 - protein, 40 aa, Artificial Sequence
  Description of Artificial Sequence: Synthetic polypeptide
KPENVLLSSQEEDCLIKITDFGHSKILGETSLMRTLCGTY

SEQ ID NO: 2998 - protein, 40 aa, Artificial Sequence
  Description of Artificial Sequence: Synthetic polypeptide
PENVLLSSQEEDCLIKITDFGHSKILGETSLMRTLCGTYT

SEQ ID NO: 2999 - protein, 40 aa, Artificial Sequence
  Description of Artificial Sequence: Synthetic polypeptide
TDFGHSKILGETSLMRTLCGTYTYLAPEVLVSVGTAGYNR

SEQ ID NO: 3000 - protein, 40 aa, Artificial Sequence
  Description of Artificial Sequence: Synthetic polypeptide
SKILGETSLMRTLCGTYTYLAPEVLVSVGTAGYNRAVDCW

SEQ ID NO: 3001 - protein, 40 aa, Artificial Sequence
  Description of Artificial Sequence: Synthetic polypeptide
KITDFGHSKILGETSLMRTLCGTPHYLAPEVLVSVGTAGY

SEQ ID NO: 3002 - protein, 40 aa, Artificial Sequence
  Description of Artificial Sequence: Synthetic polypeptide
TDFGHSKILGETSLMRTLCGTPHYLAPEVLVSVGTAGYNR

SEQ ID NO: 3003 - protein, 40 aa, Artificial Sequence
  Description of Artificial Sequence: Synthetic polypeptide
GETSLMRTLCGTPHYLAPEVLVSVGTAGYNRAVDCWSLGV

SEQ ID NO: 3004 - protein, 40 aa, Artificial Sequence
  Description of Artificial Sequence: Synthetic polypeptide
NRAVDCWSLGFILFICLSGYPPFSEHRTQVSLKDQITSGK

SEQ ID NO: 3005 - protein, 40 aa, Artificial Sequence
  Description of Artificial Sequence: Synthetic polypeptide
AVDCWSLGFILFICLSGYPPFSEHRTQVSLKDQITSGKYN

SEQ ID NO: 3006 - protein, 40 aa, Artificial Sequence
  Description of Artificial Sequence: Synthetic polypeptide
WSLGFILFICLSGYPPFSEHRTQVSLKDQITSGKYNFIPE

SEQ ID NO: 3007 - protein, 40 aa, Artificial Sequence
  Description of Artificial Sequence: Synthetic polypeptide
LKDQITSGKYNFIPEVGAEVSEKALDLVKKLLVVDPKARF

SEQ ID NO: 3008 - protein, 40 aa, Artificial Sequence
  Description of Artificial Sequence: Synthetic polypeptide
ITSGKYNFIPEVGAEVSEKALDLVKKLLVVDPKARFTTEE

SEQ ID NO: 3009 - protein, 40 aa, Artificial Sequence
  Description of Artificial Sequence: Synthetic polypeptide
FIPEVGAEVSEKALDLVKKLLVVDPKARFTTEEALRHPWL

SEQ ID NO: 3010 - protein, 40 aa, Artificial Sequence
  Description of Artificial Sequence: Synthetic polypeptide
SKLIILASGGPQALVNIMRTYTFEKLLWTTSRVLKVLSVC

SEQ ID NO: 3011 - protein, 40 aa, Artificial Sequence
  Description of Artificial Sequence: Synthetic polypeptide
KLIILASGGPQALVNIMRTYTFEKLLWTTSRVLKVLSVCS

SEQ ID NO: 3012 - protein, 40 aa, Artificial Sequence
  Description of Artificial Sequence: Synthetic polypeptide
LIILASGGPQALVNIMRTYTFEKLLWTTSRVLKVLSVCSS

SEQ ID NO: 3013 - protein, 40 aa, Artificial Sequence
  Description of Artificial Sequence: Synthetic polypeptide
QALVNIMRTYTFEKLLWTTSRVLKVLSVCSSNKPAIVEAG

SEQ ID NO: 3014 - protein, 40 aa, Artificial Sequence
  Description of Artificial Sequence: Synthetic polypeptide
NIMRTYTFEKLLWTTSRVLKVLSVCSSNKPAIVEAGGMQA

SEQ ID NO: 3015 - protein, 40 aa, Artificial Sequence
  Description of Artificial Sequence: Synthetic polypeptide
SKLIILASGGPQALVNIMRTYTYKKLLWTTSRVLKVLSVC

SEQ ID NO: 3016 - protein, 40 aa, Artificial Sequence
  Description of Artificial Sequence: Synthetic polypeptide
LIILASGGPQALVNIMRTYTYKKLLWTTSRVLKVLSVCSS

SEQ ID NO: 3017 - protein, 40 aa, Artificial Sequence
  Description of Artificial Sequence: Synthetic polypeptide
ASGGPQALVNIMRTYTYKKLLWTTSRVLKVLSVCSSNKPA

SEQ ID NO: 3018 - protein, 40 aa, Artificial Sequence
  Description of Artificial Sequence: Synthetic polypeptide
NIMRTYTYKKLLWTTSRVLKVLSVCSSNKPAIVEAGGMQA

SEQ ID NO: 3019 - protein, 40 aa, Artificial Sequence
  Description of Artificial Sequence: Synthetic polypeptide
IMRTYTYKKLLWTTSRVLKVLSVCSSNKPAIVEAGGMQAL

SEQ ID NO: 3020 - protein, 40 aa, Artificial Sequence
  Description of Artificial Sequence: Synthetic polypeptide
KLIILASGGPQALVNIMRTYTYETLLWTTSRVLKVLSVCS

SEQ ID NO: 3021 - protein, 40 aa, Artificial Sequence
  Description of Artificial Sequence: Synthetic polypeptide
PQALVNIMRTYTYETLLWTTSRVLKVLSVCSSNKPAIVEA

SEQ ID NO: 3022 - protein, 40 aa, Artificial Sequence
  Description of Artificial Sequence: Synthetic polypeptide
NIMRTYTYETLLWTTSRVLKVLSVCSSNKPAIVEAGGMQA

SEQ ID NO: 3023 - protein, 40 aa, Artificial Sequence
  Description of Artificial Sequence: Synthetic polypeptide
RILSDAATKQEGMEGLLGTLVQLLGSDDINVVTCAAGILS

SEQ ID NO: 3024 - protein, 40 aa, Artificial Sequence
  Description of Artificial Sequence: Synthetic polypeptide
NCLWTLRKLSDAATKQEGMEGLLGTLVQLLGSDDINVVTC

SEQ ID NO: 3025 - protein, 40 aa, Artificial Sequence
  Description of Artificial Sequence: Synthetic polypeptide
RKLSDAATKQEGMEGLLGTLVQLLGSDDINVVTCAAGILS

SEQ ID NO: 3026 - protein, 40 aa, Artificial Sequence
  Description of Artificial Sequence: Synthetic polypeptide
QNCLWTLRYLSDAATKQEGMEGLLGTLVQLLGSDDINVVT

SEQ ID NO: 3027 - protein, 40 aa, Artificial Sequence
  Description of Artificial Sequence: Synthetic polypeptide
NCLWTLRYLSDAATKQEGMEGLLGTLVQLLGSDDINVVTC

SEQ ID NO: 3028 - protein, 40 aa, Artificial Sequence
  Description of Artificial Sequence: Synthetic polypeptide
CLWTLRYLSDAATKQEGMEGLLGTLVQLLGSDDINVVTCA

SEQ ID NO: 3029 - protein, 40 aa, Artificial Sequence
  Description of Artificial Sequence: Synthetic polypeptide
TLRYLSDAATKQEGMEGLLGTLVQLLGSDDINVVTCAAGI

SEQ ID NO: 3030 - protein, 40 aa, Artificial Sequence
  Description of Artificial Sequence: Synthetic polypeptide
RYLSDAATKQEGMEGLLGTLVQLLGSDDINVVTCAAGILS

SEQ ID NO: 3031 - protein, 40 aa, Artificial Sequence
  Description of Artificial Sequence: Synthetic polypeptide
NLSDAATKQEGMEGLLGTLVQLLGSDDINVVTCAAGILSD

SEQ ID NO: 3032 - protein, 40 aa, Artificial Sequence
  Description of Artificial Sequence: Synthetic polypeptide
LVQLLGSDDINVVTCAAGILSDLTCNNYKNKMMVCQVGGI

SEQ ID NO: 3033 - protein, 40 aa, Artificial Sequence
  Description of Artificial Sequence: Synthetic polypeptide
LGSDDINVVTCAAGILSDLTCNNYKNKMMVCQVGGIEALV

SEQ ID NO: 3034 - protein, 40 aa, Artificial Sequence
  Description of Artificial Sequence: Synthetic polypeptide
SDDINVVTCAAGILSDLTCNNYKNKMMVCQVGGIEALVRT

SEQ ID NO: 3035 - protein, 40 aa, Artificial Sequence
  Description of Artificial Sequence: Synthetic polypeptide
DDINVVTCAAGILSDLTCNNYKNKMMVCQVGGIEALVRTV

SEQ ID NO: 3036 - protein, 40 aa, Artificial Sequence
  Description of Artificial Sequence: Synthetic polypeptide
DINVVTCAAGILSDLTCNNYKNKMMVCQVGGIEALVRTVL

SEQ ID NO: 3037 - protein, 40 aa, Artificial Sequence
  Description of Artificial Sequence: Synthetic polypeptide
INVVTCAAGILSDLTCNNYKNKMMVCQVGGIEALVRTVLR

SEQ ID NO: 3038 - protein, 40 aa, Artificial Sequence
  Description of Artificial Sequence: Synthetic polypeptide
VVTCAAGILSDLTCNNYKNKMMVCQVGGIEALVRTVLRAG

SEQ ID NO: 3039 - protein, 40 aa, Artificial Sequence
  Description of Artificial Sequence: Synthetic polypeptide
TCAAGILSDLTCNNYKNKMMVCQVGGIEALVRTVLRAGDR

SEQ ID NO: 3040 - protein, 40 aa, Artificial Sequence
  Description of Artificial Sequence: Synthetic polypeptide
ISNVKHVINFDLPSDIEEYVHRIGRAGRVGNLGLATSFFN

SEQ ID NO: 3041 - protein, 40 aa, Artificial Sequence
  Description of Artificial Sequence: Synthetic polypeptide
PSDIEEYVHRIGRAGRVGNLGLATSFFNERNINITKDLLD

SEQ ID NO: 3042 - protein, 40 aa, Artificial Sequence
  Description of Artificial Sequence: Synthetic polypeptide
PSDIEEYVHRIGRMGRVGNLGLATSFFNERNINITKDLLD

SEQ ID NO: 3043 - protein, 40 aa, Artificial Sequence
  Description of Artificial Sequence: Synthetic polypeptide
LLQAFTHASYHYNTITDCYQSLEFLGDAILDYLITKHLYE

SEQ ID NO: 3044 - protein, 40 aa, Artificial Sequence
  Description of Artificial Sequence: Synthetic polypeptide
FEKKINYRFKNKAYLLQAFTHASYHYNTITDCYQRLKFLG

SEQ ID NO: 3045 - protein, 40 aa, Artificial Sequence
  Description of Artificial Sequence: Synthetic polypeptide
KKINYRFKNKAYLLQAFTHASYHYNTITDCYQRLKFLGDA

SEQ ID NO: 3046 - protein, 40 aa, Artificial Sequence
  Description of Artificial Sequence: Synthetic polypeptide
KINYRFKNKAYLLQAFTHASYHYNTITDCYQRLKFLGDAI

SEQ ID NO: 3047 - protein, 40 aa, Artificial Sequence
  Description of Artificial Sequence: Synthetic polypeptide
INYRFKNKAYLLQAFTHASYHYNTITDCYQRLKFLGDAIL

SEQ ID NO: 3048 - protein, 40 aa, Artificial Sequence
  Description of Artificial Sequence: Synthetic polypeptide
RFKNKAYLLQAFTHASYHYNTITDCYQRLKFLGDAILDYL

SEQ ID NO: 3049 - protein, 40 aa, Artificial Sequence
  Description of Artificial Sequence: Synthetic polypeptide
FKNKAYLLQAFTHASYHYNTITDCYQRLKFLGDAILDYLI

SEQ ID NO: 3050 - protein, 40 aa, Artificial Sequence
  Description of Artificial Sequence: Synthetic polypeptide
KAYLLQAFTHASYHYNTITDCYQRLKFLGDAILDYLITKH

SEQ ID NO: 3051 - protein, 40 aa, Artificial Sequence
  Description of Artificial Sequence: Synthetic polypeptide
LQAFTHASYHYNTITDCYQRLKFLGDAILDYLITKHLYED

SEQ ID NO: 3052 - protein, 40 aa, Artificial Sequence
  Description of Artificial Sequence: Synthetic polypeptide
KKINYRFKNKAYLLQAFTHASYHYNTITDCYQRLEFLGNA

SEQ ID NO: 3053 - protein, 40 aa, Artificial Sequence
  Description of Artificial Sequence: Synthetic polypeptide
KINYRFKNKAYLLQAFTHASYHYNTITDCYQRLEFLGNAI

SEQ ID NO: 3054 - protein, 40 aa, Artificial Sequence
  Description of Artificial Sequence: Synthetic polypeptide
YRFKNKAYLLQAFTHASYHYNTITDCYQRLEFLGNAILDY

SEQ ID NO: 3055 - protein, 40 aa, Artificial Sequence
  Description of Artificial Sequence: Synthetic polypeptide
LLQAFTHASYHYNTITDCYQRLEFLGNAILDYLITKHLYE

SEQ ID NO: 3056 - protein, 40 aa, Artificial Sequence
  Description of Artificial Sequence: Synthetic polypeptide
IEVPNAMGDIFESLAGAIYMDSGMSLETVWQVYYPMMRPL

SEQ ID NO: 3057 - protein, 40 aa, Artificial Sequence
  Description of Artificial Sequence: Synthetic polypeptide
VIFESLAGAIYMDSGMSLETVWQVYYPMMRPLIEKFSANV

SEQ ID NO: 3058 - protein, 40 aa, Artificial Sequence
  Description of Artificial Sequence: Synthetic polypeptide
MGYIFESLAGAIYMDSGMSLETVWQVYYPMMRPLIEKFSA

SEQ ID NO: 3059 - protein, 40 aa, Artificial Sequence
  Description of Artificial Sequence: Synthetic polypeptide
DIFDSLAGAIYMDSGMSLETVWQVYYPMMRPLIEKFSANV

SEQ ID NO: 3060 - protein, 40 aa, Artificial Sequence
  Description of Artificial Sequence: Synthetic polypeptide
NTVERIPLENLQIIGGNMYYENSYALAVLSNYDANKTGLK

SEQ ID NO: 3061 - protein, 40 aa, Artificial Sequence
  Description of Artificial Sequence: Synthetic polypeptide
VERIPLENLQIIGGNMYYENSYALAVLSNYDANKTGLKEL

SEQ ID NO: 3062 - protein, 40 aa, Artificial Sequence
  Description of Artificial Sequence: Synthetic polypeptide
LQIIGGNMYYENSYALAVLSNYDANKTGLKELPMRNLQEI

SEQ ID NO: 3063 - protein, 40 aa, Artificial Sequence
  Description of Artificial Sequence: Synthetic polypeptide
QIIGGNMYYENSYALAVLSNYDANKTGLKELPMRNLQEIL

SEQ ID NO: 3064 - protein, 40 aa, Artificial Sequence
  Description of Artificial Sequence: Synthetic polypeptide
IIGGNMYYENSYALAVLSNYDANKTGLKELPMRNLQEILH

SEQ ID NO: 3065 - protein, 40 aa, Artificial Sequence
  Description of Artificial Sequence: Synthetic polypeptide
IGGNMYYENSYALAVLSNYDANKTGLKELPMRNLQEILHG

SEQ ID NO: 3066 - protein, 40 aa, Artificial Sequence
  Description of Artificial Sequence: Synthetic polypeptide
IALNTVERIPLENLQIIKGNMYYENSYALAVLSNYDANKT

SEQ ID NO: 3067 - protein, 40 aa, Artificial Sequence
  Description of Artificial Sequence: Synthetic polypeptide
IPLENLQIIKGNMYYENSYALAVLSNYDANKTGLKELPMR

SEQ ID NO: 3068 - protein, 40 aa, Artificial Sequence
  Description of Artificial Sequence: Synthetic polypeptide
NLQIIKGNMYYENSYALAVLSNYDANKTGLKELPMRNLQE

SEQ ID NO: 3069 - protein, 40 aa, Artificial Sequence
  Description of Artificial Sequence: Synthetic polypeptide
IKGNMYYENSYALAVLSNYDANKTGLKELPMRNLQEILHG

SEQ ID NO: 3070 - protein, 40 aa, Artificial Sequence
  Description of Artificial Sequence: Synthetic polypeptide
QERELVEPLTPSGEAPNQALLRILKETEFKKIKVLCSGAF

SEQ ID NO: 3071 - protein, 40 aa, Artificial Sequence
  Description of Artificial Sequence: Synthetic polypeptide
ELVEPLTPSGEAPNQALLRILKETEFKKIKVLGSGAFSTV

SEQ ID NO: 3072 - protein, 40 aa, Artificial Sequence
  Description of Artificial Sequence: Synthetic polypeptide
GEAPNQALLRILKETEFKKIKVLGSGAFSTVYKGLWIPEG

SEQ ID NO: 3073 - protein, 40 aa, Artificial Sequence
  Description of Artificial Sequence: Synthetic polypeptide
LGSGAFSTVYKGLWIPEGEKVKIPVAIKELREATSPKANK

SEQ ID NO: 3074 - protein, 40 aa, Artificial Sequence
  Description of Artificial Sequence: Synthetic polypeptide
GLWIPEGEKVKIPVAIKELREATSPKANKENLDEAYVMAS

SEQ ID NO: 3075 - protein, 40 aa, Artificial Sequence
  Description of Artificial Sequence: Synthetic polypeptide
LWIPEGEKVKIPVAIKELREATSPKANKENLDEAYVMASV

SEQ ID NO: 3076 - protein, 40 aa, Artificial Sequence
  Description of Artificial Sequence: Synthetic polypeptide
KVKIPVAIKELREATSPKANKENLDEAYVMASVDNPHVCR

SEQ ID NO: 3077 - protein, 40 aa, Artificial Sequence
  Description of Artificial Sequence: Synthetic polypeptide
VKIPVAIKELREATSPKANKENLDEAYVMASVDNPHVCRL

SEQ ID NO: 3078 - protein, 40 aa, Artificial Sequence
  Description of Artificial Sequence: Synthetic polypeptide
LQRMFNNCEVVLGNLEITYVQRNYDLSFLKTIQEMAGYVL

SEQ ID NO: 3079 - protein, 40 aa, Artificial Sequence
  Description of Artificial Sequence: Synthetic polypeptide
RMFNNCEVVLGNLEITYVQRNYDLSFLKTIQEMAGYVLIA

SEQ ID NO: 3080 - protein, 40 aa, Artificial Sequence
  Description of Artificial Sequence: Synthetic polypeptide
MFNNCEVVLGNLEITYVQRNYDLSFLKTIQEMAGYVLIAL

SEQ ID NO: 3081 - protein, 40 aa, Artificial Sequence
  Description of Artificial Sequence: Synthetic polypeptide
FNNCEVVLGNLEITYVQRNYDLSFLKTIQEMAGYVLIALN

SEQ ID NO: 3082 - protein, 40 aa, Artificial Sequence
  Description of Artificial Sequence: Synthetic polypeptide
VVLGNLEITYVQRNYDLSFLKTIQEMAGYVLIALNTVERI

SEQ ID NO: 3083 - protein, 40 aa, Artificial Sequence
  Description of Artificial Sequence: Synthetic polypeptide
SDCPPPNQRRVYISDLDSVHFFRPKCLRTAVYHEILIGYL

SEQ ID NO: 3084 - protein, 40 aa, Artificial Sequence
  Description of Artificial Sequence: Synthetic polypeptide
CPPPNQRRVYISDLDSVHFFRPKCLRTAVYHEILIGYLEY

SEQ ID NO: 3085 - protein, 40 aa, Artificial Sequence
  Description of Artificial Sequence: Synthetic polypeptide
RRVYISDLDSVHFFRPKCLRTAVYHEILIGYLEYVKKLGY

SEQ ID NO: 3086 - protein, 40 aa, Artificial Sequence
  Description of Artificial Sequence: Synthetic polypeptide
YISDLDSVHFFRPKCLRTAVYHEILIGYLEYVKKLGYTTG

SEQ ID NO: 3087 - protein, 40 aa, Artificial Sequence
  Description of Artificial Sequence: Synthetic polypeptide
GSDCPPPNQRRVYISYPDSVHFFRPKCLRTAVYHEILIGY

SEQ ID NO: 3088 - protein, 40 aa, Artificial Sequence
  Description of Artificial Sequence: Synthetic polypeptide
SDCPPPNQRRVYISYPDSVHFFRPKCLRTAVYHEILIGYL

SEQ ID NO: 3089 - protein, 40 aa, Artificial Sequence
  Description of Artificial Sequence: Synthetic polypeptide
RRVYISYPDSVHFFRPKCLRTAVYHEILIGYLEYVKKLGY

SEQ ID NO: 3090 - protein, 40 aa, Artificial Sequence
  Description of Artificial Sequence: Synthetic polypeptide
YISYPDSVHFFRPKCLRTAVYHEILIGYLEYVKKLGYTTG

SEQ ID NO: 3091 - protein, 40 aa, Artificial Sequence
  Description of Artificial Sequence: Synthetic polypeptide
ISYPDSVHFFRPKCLRTAVYHEILIGYLEYVKKLGYTTGH

SEQ ID NO: 3092 - protein, 40 aa, Artificial Sequence
  Description of Artificial Sequence: Synthetic polypeptide
QRRVYISYLNSVHFFRPKCLRTAVYHEILIGYLEYVKKLG

SEQ ID NO: 3093 - protein, 40 aa, Artificial Sequence
  Description of Artificial Sequence: Synthetic polypeptide
RRVYISYLNSVHFFRPKCLRTAVYHEILIGYLEYVKKLGY

SEQ ID NO: 3094 - protein, 40 aa, Artificial Sequence
  Description of Artificial Sequence: Synthetic polypeptide
YISYLDIVHFFRPKCLRTAVYHEILIGYLEYVKKLGYTTG

SEQ ID NO: 3095 - protein, 40 aa, Artificial Sequence
  Description of Artificial Sequence: Synthetic polypeptide
ISYLDIVHFFRPKCLRTAVYHEILIGYLEYVKKLGYTTGH

SEQ ID NO: 3096 - protein, 40 aa, Artificial Sequence
  Description of Artificial Sequence: Synthetic polypeptide
RRVYISYLDSVHFFRPKCLRTAVCHEILIGYLEYVKKLGY

SEQ ID NO: 3097 - protein, 40 aa, Artificial Sequence
  Description of Artificial Sequence: Synthetic polypeptide
RVYISYLDSVHFFRPKCLRTAVCHEILIGYLEYVKKLGYT

SEQ ID NO: 3098 - protein, 40 aa, Artificial Sequence
  Description of Artificial Sequence: Synthetic polypeptide
YISYLDSVHFFRPKCLRTAVCHEILIGYLEYVKKLGYTTG

SEQ ID NO: 3099 - protein, 40 aa, Artificial Sequence
  Description of Artificial Sequence: Synthetic polypeptide
ISYLDSVHFFRPKCLRTAVCHEILIGYLEYVKKLGYTTGH

SEQ ID NO: 3100 - protein, 40 aa, Artificial Sequence
  Description of Artificial Sequence: Synthetic polypeptide
FRPKCLRTAVCHEILIGYLEYVKKLGYTTGHIWACPPSEG

SEQ ID NO: 3101 - protein, 40 aa, Artificial Sequence
  Description of Artificial Sequence: Synthetic polypeptide
SDCPPPNQRRVYISYLDSVHFFRPKCLRTAVDHEILIGYL

SEQ ID NO: 3102 - protein, 40 aa, Artificial Sequence
  Description of Artificial Sequence: Synthetic polypeptide
RVYISYLDSVHFFRPKCLRTAVDHEILIGYLEYVKKLGYT

SEQ ID NO: 3103 - protein, 40 aa, Artificial Sequence
  Description of Artificial Sequence: Synthetic polypeptide
VDHEILIGYLEYVKKLGYTTGHIWACPPSEGDDYIFHCHP

SEQ ID NO: 3104 - protein, 40 aa, Artificial Sequence
  Description of Artificial Sequence: Synthetic polypeptide
VKKLGYTTGHIWACPPSEGDDYIFHCPPPDQKIPKPKRLQ

SEQ ID NO: 3105 - protein, 40 aa, Artificial Sequence
  Description of Artificial Sequence: Synthetic polypeptide
YTTGHIWACPPSEGDDYIFHCPPPDQKIPKPKRLQEWYKK

SEQ ID NO: 3106 - protein, 40 aa, Artificial Sequence
  Description of Artificial Sequence: Synthetic polypeptide
ETELRKVKVLGSGAFGTVYKGIWIPDGENVKIPVAIKVMR

SEQ ID NO: 3107 - protein, 40 aa, Artificial Sequence
  Description of Artificial Sequence: Synthetic polypeptide
KIPVAIKVMRENTSPKANKEILDEAYVMAGVGSPYVSRLL

SEQ ID NO: 3108 - protein, 40 aa, Artificial Sequence
  Description of Artificial Sequence: Synthetic polypeptide
PVAIKILNETTGPKANVEFMDEALIMASMDHPHLVRLLRV

SEQ ID NO: 3109 - protein, 40 aa, Artificial Sequence
  Description of Artificial Sequence: Synthetic polypeptide
VAIKILNETTGPKANVEFMDEALIMASMDHPHLVRLLRVC

SEQ ID NO: 3110 - protein, 40 aa, Artificial Sequence
  Description of Artificial Sequence: Synthetic polypeptide
AIKILNETTGPKANVEFMDEALIMASMDHPHLVRLLVVCL

SEQ ID NO: 3111 - protein, 40 aa, Artificial Sequence
  Description of Artificial Sequence: Synthetic polypeptide
LHEKRVVSGSRDATLRVWDIETGQCLHVLMGHVAAVRLVQ

SEQ ID NO: 3112 - protein, 40 aa, Artificial Sequence
  Description of Artificial Sequence: Synthetic polypeptide
EKRVVSGSRDATLRVWDIETGQCLHVLMGHVAAVRLVQYD

SEQ ID NO: 3113 - protein, 40 aa, Artificial Sequence
  Description of Artificial Sequence: Synthetic polypeptide
GSRDATLRVWDIETGQCLHVLMGHVAAVRLVQYDGRRVVS

SEQ ID NO: 3114 - protein, 40 aa, Artificial Sequence
  Description of Artificial Sequence: Synthetic polypeptide
RVWDIETGQCLHVLMGHVAAVRLVQYDGRRVVSGAYDFMV

SEQ ID NO: 3115 - protein, 40 aa, Artificial Sequence
  Description of Artificial Sequence: Synthetic polypeptide
ETGQCLHVLMGHVAAVRLVQYDGRRVVSGAYDFMVKVWDP

SEQ ID NO: 3116 - protein, 40 aa, Artificial Sequence
  Description of Artificial Sequence: Synthetic polypeptide
LVQYDGRRVVSGAYDFMVKVWDPETETCLHTLQGHTNRVY

SEQ ID NO: 3117 - protein, 40 aa, Artificial Sequence
  Description of Artificial Sequence: Synthetic polypeptide
RVVSGAYDFMVKVWDPETETCLHTLQGHTNRVCSLQFDGI

SEQ ID NO: 3118 - protein, 40 aa, Artificial Sequence
  Description of Artificial Sequence: Synthetic polypeptide
VSGAYDFMVKVWDPETETCLHTLQGHTNRVCSLQFDGIHV

SEQ ID NO: 3119 - protein, 40 aa, Artificial Sequence
  Description of Artificial Sequence: Synthetic polypeptide
GAYDFMVKVWDPETETCLHTLQGHTNRVCSLQFDGIHVVS

SEQ ID NO: 3120 - protein, 40 aa, Artificial Sequence
  Description of Artificial Sequence: Synthetic polypeptide
LQGHTNRVCSLQFDGIHVVSGSLDTSIRVWDVETGNCIHT

SEQ ID NO: 3121 - protein, 40 aa, Artificial Sequence
  Description of Artificial Sequence: Synthetic polypeptide
DGRRVVSGAYDFMVKVWDPETETCLHTLQGHTNRVHSLQF

SEQ ID NO: 3122 - protein, 40 aa, Artificial Sequence
  Description of Artificial Sequence: Synthetic polypeptide
VSGAYDFMVKVWDPETETCLHTLQGHTNRVHSLQFDGIHV

SEQ ID NO: 3123 - protein, 40 aa, Artificial Sequence
  Description of Artificial Sequence: Synthetic polypeptide
TGHQSLTLGMELKDNILVSGNADSTVKIWDIKTGQCLQTL

SEQ ID NO: 3124 - protein, 40 aa, Artificial Sequence
  Description of Artificial Sequence: Synthetic polypeptide
ANSTVKIWDIKTGQCLQTLQGPNKHQSAVTCLQFNKNFVI

SEQ ID NO: 3125 - protein, 40 aa, Artificial Sequence
  Description of Artificial Sequence: Synthetic polypeptide
ADSTVKIWDIKTGQCLQTLQGPNKHQCAVTCLQFNKNFVI

SEQ ID NO: 3126 - protein, 40 aa, Artificial Sequence
  Description of Artificial Sequence: Synthetic polypeptide
ATEKDLSDLVSEMEMMKMIGKQKNIINLLGACTQDGPLYV

SEQ ID NO: 3127 - protein, 40 aa, Artificial Sequence
  Description of Artificial Sequence: Synthetic polypeptide
EKDLSDLVSEMEMMKMIGKQKNIINLLGACTQDGPLYVIV

SEQ ID NO: 3128 - protein, 40 aa, Artificial Sequence
  Description of Artificial Sequence: Synthetic polypeptide
KDLSDLVSEMEMMKMIGKQKNIINLLGACTQDGPLYVIVE

SEQ ID NO: 3129 - protein, 40 aa, Artificial Sequence
  Description of Artificial Sequence: Synthetic polypeptide
MMKMIGKQKNIINLLGACTQDGPLYVIVEYASKGNLREYL

SEQ ID NO: 3130 - protein, 40 aa, Artificial Sequence
  Description of Artificial Sequence: Synthetic polypeptide
MKMIGKQKNIINLLGACTQDGPLYVIVEYASKGNLREYLR

SEQ ID NO: 3131 - protein, 40 aa, Artificial Sequence
  Description of Artificial Sequence: Synthetic polypeptide
RENLEFGKVLGLGAFGKVMNATAYGISKTGVSIQVAVKML

SEQ ID NO: 3132 - protein, 40 aa, Artificial Sequence
  Description of Artificial Sequence: Synthetic polypeptide
DVDRIATLGYLPTQQDVLRVCVPTTGIIEYPFDLENIIFR

SEQ ID NO: 3133 - protein, 40 aa, Artificial Sequence
  Description of Artificial Sequence: Synthetic polypeptide
IEYPFDLQSVIFRMVDVGGPRSERRKWIHCFENVTSIMFL

SEQ ID NO: 3134 - protein, 40 aa, Artificial Sequence
  Description of Artificial Sequence: Synthetic polypeptide
NVTSIMFLVALSEYDQVLVESDNENGMEESKALFRTIITY

SEQ ID NO: 3135 - protein, 40 aa, Artificial Sequence
  Description of Artificial Sequence: Synthetic polypeptide
VLVESDNENGMEESKALFRTIITYPWFQNSSVILFLNKKD

SEQ ID NO: 3136 - protein, 40 aa, Artificial Sequence
  Description of Artificial Sequence: Synthetic polypeptide
ENGMEESKALFRTIITYPWFQNSSVILFLNKKDLLEEKIM

SEQ ID NO: 3137 - protein, 40 aa, Artificial Sequence
  Description of Artificial Sequence: Synthetic polypeptide
SPGVVISDDEPGYDLDLFCIPNHYAEDLERVFIPHGLIMD

SEQ ID NO: 3138 - protein, 40 aa, Artificial Sequence
  Description of Artificial Sequence: Synthetic polypeptide
LIMDRTERLARDVMKEMGGHHIVALCVLKGGYKFFADLLD

SEQ ID NO: 3139 - protein, 40 aa, Artificial Sequence
  Description of Artificial Sequence: Synthetic polypeptide
HIVALCVLKGGYKFFADLLDYIKALNRNSDRSIPMTVDFI

SEQ ID NO: 3140 - protein, 40 aa, Artificial Sequence
  Description of Artificial Sequence: Synthetic polypeptide
ALCVLKGGYKFFADLLDYIKALNRNSDRSIPMTVDFIRLK

SEQ ID NO: 3141 - protein, 40 aa, Artificial Sequence
  Description of Artificial Sequence: Synthetic polypeptide
ADLLDYIKALNRNSDRSIPMTVDFIRLKSYCNDQSTGDIK

SEQ ID NO: 3142 - protein, 40 aa, Artificial Sequence
  Description of Artificial Sequence: Synthetic polypeptide
GDIKVIGGDDLSTLTGKNVLIVEDIIDTGKTMQTLLSLVR

SEQ ID NO: 3143 - protein, 40 aa, Artificial Sequence
  Description of Artificial Sequence: Synthetic polypeptide
IKVIGGDDLSTLTGKNVLIVEDIIDTGKTMQTLLSLVRQY

SEQ ID NO: 3144 - protein, 40 aa, Artificial Sequence
  Description of Artificial Sequence: Synthetic polypeptide
KVIGGDDLSTLTGKNVLIVEDIIDTGKTMQTLLSLVRQYN

SEQ ID NO: 3145 - protein, 40 aa, Artificial Sequence
  Description of Artificial Sequence: Synthetic polypeptide
RSVGYKPDFVGFEIPDKFVVGYALDYNEYFRDLNHVCVIS

SEQ ID NO: 3146 - protein, 40 aa, Artificial Sequence
  Description of Artificial Sequence: Synthetic polypeptide
SVGYKPDFVGFEIPDKFVVGYALDYNEYFRDLNHVCVISE

SEQ ID NO: 3147 - protein, 40 aa, Artificial Sequence
  Description of Artificial Sequence: Synthetic polypeptide
VVVGAVGVGKSALTIQLIQNHFVDEYDPTIEDSYRKQVVI

SEQ ID NO: 3148 - protein, 40 aa, Artificial Sequence
  Description of Artificial Sequence: Synthetic polypeptide
VVVGAGRVGKSALTIQLIQNHFVDEYDPTIEDSYRKQVVI

SEQ ID NO: 3149 - protein, 40 aa, Artificial Sequence
  Description of Artificial Sequence: Synthetic polypeptide
VDEYDPTIEDSYRKQVVIDGETCLLDILDTASQEEYSAMR

SEQ ID NO: 3150 - protein, 40 aa, Artificial Sequence
  Description of Artificial Sequence: Synthetic polypeptide
EAIICKNIPRLVSGWVKPIIIGCHAYGDQYRATDFVVPGP

SEQ ID NO: 3151 - protein, 40 aa, Artificial Sequence
  Description of Artificial Sequence: Synthetic polypeptide
RLVSGWVKPIIIGCHAYGDQYRATDFVVPGPGKVEITYTP

SEQ ID NO: 3152 - protein, 40 aa, Artificial Sequence
  Description of Artificial Sequence: Synthetic polypeptide
VKPIIIGHHAYGDQYRATDFVVPGPGKVEITYTPSDGTQK

SEQ ID NO: 3153 - protein, 40 aa, Artificial Sequence
  Description of Artificial Sequence: Synthetic polypeptide
VGRLIYTAGDYFRQSLSYLEAYNPSDGTWLRLADLQVPRS

SEQ ID NO: 3154 - protein, 40 aa, Artificial Sequence
  Description of Artificial Sequence: Synthetic polypeptide
DEWHLVAPMLTRRIGVGVAVLNRLLYAVGSFDGTNRLNSA

SEQ ID NO: 3155 - protein, 40 aa, Artificial Sequence
  Description of Artificial Sequence: Synthetic polypeptide
HLVAPMLTRRIGVGVAVLNRLLYAVGSFDGTNRLNSAECY

SEQ ID NO: 3156 - protein, 40 aa, Artificial Sequence
  Description of Artificial Sequence: Synthetic polypeptide
TRRIGVGVAVLNRLLYAVGSFDGTNRLNSAECYYPERNEW

SEQ ID NO: 3157 - protein, 40 aa, Artificial Sequence
  Description of Artificial Sequence: Synthetic polypeptide
LFTPLLIGFVIVAGMMCIIVMILTYKYLQKPMYEVQWKGV

SEQ ID NO: 3158 - protein, 40 aa, Artificial Sequence
  Description of Artificial Sequence: Synthetic polypeptide
YEVQWKGVEEINGNNYVYIDPTQLPYDHKWEFPRNRLSFG

SEQ ID NO: 3159 - protein, 40 aa, Artificial Sequence
  Description of Artificial Sequence: Synthetic polypeptide
VQWKGVEEINGNNYVYIDPTQLPYDHKWEFPRNRLSFGKT

SEQ ID NO: 3160 - protein, 40 aa, Artificial Sequence
  Description of Artificial Sequence: Synthetic polypeptide
QWKGVEEINGNNYVYIDPTQLPYDHKWEFPRNRLSFGKTL

SEQ ID NO: 3161 - protein, 40 aa, Artificial Sequence
  Description of Artificial Sequence: Synthetic polypeptide
GVEEINGNNYVYIDPTQLPYDHKWEFPRNRLSFGKTLGAG

SEQ ID NO: 3162 - protein, 40 aa, Artificial Sequence
  Description of Artificial Sequence: Synthetic polypeptide
PMYEVQWKVVEEINGNNYVYIDQTQLPYDHKWEFPRNRLS

SEQ ID NO: 3163 - protein, 40 aa, Artificial Sequence
  Description of Artificial Sequence: Synthetic polypeptide
MYEVQWKVVEEINGNNYVYIDQTQLPYDHKWEFPRNRLSF

SEQ ID NO: 3164 - protein, 40 aa, Artificial Sequence
  Description of Artificial Sequence: Synthetic polypeptide
YEVQWKVVEEINGNNYVYIDQTQLPYDHKWEFPRNRLSFG

SEQ ID NO: 3165 - protein, 40 aa, Artificial Sequence
  Description of Artificial Sequence: Synthetic polypeptide
EVQWKVVEEINGNNYVYIDQTQLPYDHKWEFPRNRLSFGK

SEQ ID NO: 3166 - protein, 40 aa, Artificial Sequence
  Description of Artificial Sequence: Synthetic polypeptide
VQWKVVEEINGNNYVYIDQTQLPYDHKWEFPRNRLSFGKT

SEQ ID NO: 3167 - protein, 40 aa, Artificial Sequence
  Description of Artificial Sequence: Synthetic polypeptide
VEEINGNNYVYIDQTQLPYDHKWEFPRNRLSFGKTLGAGA

SEQ ID NO: 3168 - protein, 40 aa, Artificial Sequence
  Description of Artificial Sequence: Synthetic polypeptide
EINGNNYVYIDQTQLPYDHKWEFPRNRLSFGKTLGAGAFG

SEQ ID NO: 3169 - protein, 40 aa, Artificial Sequence
  Description of Artificial Sequence: Synthetic polypeptide
GNNYVYIDQTQLPYDHKWEFPRNRLSFGKTLGAGAFGKVV

SEQ ID NO: 3170 - protein, 40 aa, Artificial Sequence
  Description of Artificial Sequence: Synthetic polypeptide
NNYVYIDQTQLPYDHKWEFPRNRLSFGKTLGAGAFGKVVE

SEQ ID NO: 3171 - protein, 40 aa, Artificial Sequence
  Description of Artificial Sequence: Synthetic polypeptide
QKPMYEVQWKVVEEINGNNYVYIDPTQPPYDHKWEFPRNR

SEQ ID NO: 3172 - protein, 40 aa, Artificial Sequence
  Description of Artificial Sequence: Synthetic polypeptide
QWKVVEEINGNNYVYIDPTQPPYDHKWEFPRNRLSFGKTL

SEQ ID NO: 3173 - protein, 40 aa, Artificial Sequence
  Description of Artificial Sequence: Synthetic polypeptide
WKVVEEINGNNYVYIDPTQPPYDHKWEFPRNRLSFGKTLG

SEQ ID NO: 3174 - protein, 40 aa, Artificial Sequence
  Description of Artificial Sequence: Synthetic polypeptide
VEEINGNNYVYIDPTQPPYDHKWEFPRNRLSFGKTLGAGA

SEQ ID NO: 3175 - protein, 40 aa, Artificial Sequence
  Description of Artificial Sequence: Synthetic polypeptide
EINGNNYVYIDPTQPPYDHKWEFPRNRLSFGKTLGAGAFG

SEQ ID NO: 3176 - protein, 40 aa, Artificial Sequence
  Description of Artificial Sequence: Synthetic polypeptide
NGNNYVYIDPTQPPYDHKWEFPRNRLSFGKTLGAGAFGKV

SEQ ID NO: 3177 - protein, 40 aa, Artificial Sequence
  Description of Artificial Sequence: Synthetic polypeptide
GNNYVYIDPTQPPYDHKWEFPRNRLSFGKTLGAGAFGKVV

SEQ ID NO: 3178 - protein, 40 aa, Artificial Sequence
  Description of Artificial Sequence: Synthetic polypeptide
NNYVYIDPTQPPYDHKWEFPRNRLSFGKTLGAGAFGKVVE

SEQ ID NO: 3179 - protein, 40 aa, Artificial Sequence
  Description of Artificial Sequence: Synthetic polypeptide
LTEREAHMSELKVLSYLGNHMNIVNLLGACTIGGPTLVIT

SEQ ID NO: 3180 - protein, 40 aa, Artificial Sequence
  Description of Artificial Sequence: Synthetic polypeptide
TEREALMSELEVLSYLGNHMNIVNLLGACTIGGPTLVITE

SEQ ID NO: 3181 - protein, 40 aa, Artificial Sequence
  Description of Artificial Sequence: Synthetic polypeptide
DLAARNILLTHGRITKICDFVLARDIKNDSNYVVKGNARL

SEQ ID NO: 3182 - protein, 40 aa, Artificial Sequence
  Description of Artificial Sequence: Synthetic polypeptide
KICDFVLARDIKNDSNYVVKGNARLPVKWMAPESIFNCVY

SEQ ID NO: 3183 - protein, 40 aa, Artificial Sequence
  Description of Artificial Sequence: Synthetic polypeptide
RDLAARNILLTHGRITKICDFGLARVIKNDSNYVVKGNAR

SEQ ID NO: 3184 - protein, 40 aa, Artificial Sequence
  Description of Artificial Sequence: Synthetic polypeptide
KICDFGLARYIKNDSNYVVKGNARLPVKWMAPESIFNCVY

SEQ ID NO: 3185 - protein, 40 aa, Artificial Sequence
  Description of Artificial Sequence: Synthetic polypeptide
DQFFCTTCGQHYHGMYLDIAVTPLKRAGWQCPECKVCQNC

SEQ ID NO: 3186 - protein, 40 aa, Artificial Sequence
  Description of Artificial Sequence: Synthetic polypeptide
EYKLVVVGARGVGKSALTIQLIQNHFVDEYDPTIEDSYRK

SEQ ID NO: 3187 - protein, 40 aa, Artificial Sequence
  Description of Artificial Sequence: Synthetic polypeptide
SALTIQLIQNHFVDEYDLTIEDSYRKQVVIDGETCLLDIL

SEQ ID NO: 3188 - protein, 40 aa, Artificial Sequence
  Description of Artificial Sequence: Synthetic polypeptide
IQLIQNHFVDEYDLTIEDSYRKQVVIDGETCLLDILDTAG

SEQ ID NO: 3189 - protein, 40 aa, Artificial Sequence
  Description of Artificial Sequence: Synthetic polypeptide
DGETCLLDILDTGGQEEYSAMRDQYMRTGEGFLCVFAINN

SEQ ID NO: 3190 - protein, 40 aa, Artificial Sequence
  Description of Artificial Sequence: Synthetic polypeptide
IEDSYRKQVVIDGETCLLDILDTTGQEEYSAMRDQYMRTG

SEQ ID NO: 3191 - protein, 40 aa, Artificial Sequence
  Description of Artificial Sequence: Synthetic polypeptide
QVVIDGETCLLDILDTTGQEEYSAMRDQYMRTGEGFLCVF

SEQ ID NO: 3192 - protein, 40 aa, Artificial Sequence
  Description of Artificial Sequence: Synthetic polypeptide
HFVDEYDPTIEDSYRKQVVIDGETCLLDILDTAGKEEYSA

SEQ ID NO: 3193 - protein, 40 aa, Artificial Sequence
  Description of Artificial Sequence: Synthetic polypeptide
EYDPTIEDSYRKQVVIDGETCLLDILDTAGKEEYSAMRDQ

SEQ ID NO: 3194 - protein, 40 aa, Artificial Sequence
  Description of Artificial Sequence: Synthetic polypeptide
QNHFVDEYDPTIEDSYRKQVVIDGETCLLDILDTAGREEY

SEQ ID NO: 3195 - protein, 40 aa, Artificial Sequence
  Description of Artificial Sequence: Synthetic polypeptide
FVDEYDPTIEDSYRKQVVIDGETCLLDILDTAGREEYSAM

SEQ ID NO: 3196 - protein, 40 aa, Artificial Sequence
  Description of Artificial Sequence: Synthetic polypeptide
RKQVVIDGETCLLDILDTAGQKEYSAMRDQYMRTGEGFLC

SEQ ID NO: 3197 - protein, 40 aa, Artificial Sequence
  Description of Artificial Sequence: Synthetic polypeptide
KQVVIDGETCLLDILDTAGQKEYSAMRDQYMRTGEGFLCV

SEQ ID NO: 3198 - protein, 40 aa, Artificial Sequence
  Description of Artificial Sequence: Synthetic polypeptide
QVVIDGETCLLDILDTAGQEKYSAMRDQYMRTGEGFLCVF

SEQ ID NO: 3199 - protein, 40 aa, Artificial Sequence
  Description of Artificial Sequence: Synthetic polypeptide
MARKLIHLEIKPAIRNQIIRELQVLHERNSPYIVGFYGAF

SEQ ID NO: 3200 - protein, 40 aa, Artificial Sequence
  Description of Artificial Sequence: Synthetic polypeptide
ARKLIHLEIKPAIRNQIIRELQVLHECNSLYIVGFYGAFY

SEQ ID NO: 3201 - protein, 40 aa, Artificial Sequence
  Description of Artificial Sequence: Synthetic polypeptide
RELQVLHECNSLYIVGFYGAFYSDGEISICMEHMDGGSLD

SEQ ID NO: 3202 - protein, 40 aa, Artificial Sequence
  Description of Artificial Sequence: Synthetic polypeptide
CGAFYSDGEISICMEHMDGGSLDQVLKKAGRIPEQILGKV

SEQ ID NO: 3203 - protein, 40 aa, Artificial Sequence
  Description of Artificial Sequence: Synthetic polypeptide
GRGHFGCVYHGTLLDNDGKKIHCAVISLNRITDIGEVSQF

SEQ ID NO: 3204 - protein, 40 aa, Artificial Sequence
  Description of Artificial Sequence: Synthetic polypeptide
EKFTVKVADFGLARDMYDKEYYSVHNKTGAKLHVKWMALE

SEQ ID NO: 3205 - protein, 40 aa, Artificial Sequence
  Description of Artificial Sequence: Synthetic polypeptide
KFTVKVADFGLARDMYDKEYYSVHNKTGAKLHVKWMALES

SEQ ID NO: 3206 - protein, 40 aa, Artificial Sequence
  Description of Artificial Sequence: Synthetic polypeptide
VKVADFGLARDMYDKEYYSVHNKTGAKLHVKWMALESLQT

SEQ ID NO: 3207 - protein, 40 aa, Artificial Sequence
  Description of Artificial Sequence: Synthetic polypeptide
KVADFGLARDMYDKEYYSVHNKTGAKLHVKWMALESLQTQ

SEQ ID NO: 3208 - protein, 40 aa, Artificial Sequence
  Description of Artificial Sequence: Synthetic polypeptide
FGLARDMYDKEYYSVHNKTGAKLHVKWMALESLQTQKFTT

SEQ ID NO: 3209 - protein, 40 aa, Artificial Sequence
  Description of Artificial Sequence: Synthetic polypeptide
DEKFTVKVADFGLARDMYDKEYYSVHNKTGAKLPVCWMAL

SEQ ID NO: 3210 - protein, 40 aa, Artificial Sequence
  Description of Artificial Sequence: Synthetic polypeptide
KVADFGLARDMYDKEYYSVHNKTGAKLPVCWMALESLQTQ

SEQ ID NO: 3211 - protein, 40 aa, Artificial Sequence
  Description of Artificial Sequence: Synthetic polypeptide
DMYDKEYYSVHNKTGAKLPVCWMALESLQTQKFTTKSDVW

SEQ ID NO: 3212 - protein, 40 aa, Artificial Sequence
  Description of Artificial Sequence: Synthetic polypeptide
KEYYSVHNKTGAKLPVCWMALESLQTQKFTTKSDVWSFGV

SEQ ID NO: 3213 - protein, 40 aa, Artificial Sequence
  Description of Artificial Sequence: Synthetic polypeptide
LDEKFTVKVADFGLARDMYDKEYYSVHNKTGAKLPVHWMA

SEQ ID NO: 3214 - protein, 40 aa, Artificial Sequence
  Description of Artificial Sequence: Synthetic polypeptide
EKFTVKVADFGLARDMYDKEYYSVHNKTGAKLPVHWMALE

SEQ ID NO: 3215 - protein, 40 aa, Artificial Sequence
  Description of Artificial Sequence: Synthetic polypeptide
FGLARDMYDKEYYSVHNKTGAKLPVHWMALESLQTQKFTT

SEQ ID NO: 3216 - protein, 40 aa, Artificial Sequence
  Description of Artificial Sequence: Synthetic polypeptide
HWMALESLQTQKFTTKSDVWSFGVLLWELMTRGAPPYPDV

SEQ ID NO: 3217 - protein, 40 aa, Artificial Sequence
  Description of Artificial Sequence: Synthetic polypeptide
QKKLEKERQEQLQKEQEKAFFAQLQLGEETGEFLPIQPAQ

SEQ ID NO: 3218 - protein, 40 aa, Artificial Sequence
  Description of Artificial Sequence: Synthetic polypeptide
EKERQEQLQKEQEKAFFAQLQLDEEAGEFLPIQPAQHIQS

SEQ ID NO: 3219 - protein, 40 aa, Artificial Sequence
  Description of Artificial Sequence: Synthetic polypeptide
LEKERQEQLQKEQEKAFFAQLQLDEETVEFLPIQPAQHIQ

SEQ ID NO: 3220 - protein, 40 aa, Artificial Sequence
  Description of Artificial Sequence: Synthetic polypeptide
KLEKERQEQLQKEQEKAFFAQLQLDEETGDFLPIQPAQHI

SEQ ID NO: 3221 - protein, 40 aa, Artificial Sequence
  Description of Artificial Sequence: Synthetic polypeptide
KLEKERQEQLQKEQEKAFFAQLQLDEETGVFLPIQPAQHI

SEQ ID NO: 3222 - protein, 40 aa, Artificial Sequence
  Description of Artificial Sequence: Synthetic polypeptide
KLVVVGADGVGKSALTIQLIQNHFVDEYDPTIEDSYRKQV

SEQ ID NO: 3223 - protein, 40 aa, Artificial Sequence
  Description of Artificial Sequence: Synthetic polypeptide
TAGHEEYSAMRDQYMRTGEGFLCVFAINNSKSFADINLYR

SEQ ID NO: 3224 - protein, 40 aa, Artificial Sequence
  Description of Artificial Sequence: Synthetic polypeptide
PTIEDSYRKQVVIDGETCLLDILDTAGKEEYSAMRDQYMR

SEQ ID NO: 3225 - protein, 40 aa, Artificial Sequence
  Description of Artificial Sequence: Synthetic polypeptide
TAGKEEYSAMRDQYMRTGEGFLCVFAINNSKSFADINLYR

SEQ ID NO: 3226 - protein, 40 aa, Artificial Sequence
  Description of Artificial Sequence: Synthetic polypeptide
SALRIKILCATYMNVNIRDIDKIYVRTGIYHGGEPLCDNV

SEQ ID NO: 3227 - protein, 40 aa, Artificial Sequence
  Description of Artificial Sequence: Synthetic polypeptide
NSALRIKILCATYVIVNIRDIDKIYVRTGIYHGGEPLCDN

SEQ ID NO: 3228 - protein, 40 aa, Artificial Sequence
  Description of Artificial Sequence: Synthetic polypeptide
VIVNIRDIDKIYVRTGIYHGGEPLCDNVNTQRVPCSNPRW

SEQ ID NO: 3229 - protein, 40 aa, Artificial Sequence
  Description of Artificial Sequence: Synthetic polypeptide
KSLWVINSALRIKILCATYVYVNIRDIDKIYVRTGIYHGG

SEQ ID NO: 3230 - protein, 40 aa, Artificial Sequence
  Description of Artificial Sequence: Synthetic polypeptide
SLWVINSALRIKILCATYVYVNIRDIDKIYVRTGIYHGGE

SEQ ID NO: 3231 - protein, 40 aa, Artificial Sequence
  Description of Artificial Sequence: Synthetic polypeptide
NSALRIKILCATYVYVNIRDIDKIYVRTGIYHGGEPLCDN

SEQ ID NO: 3232 - protein, 40 aa, Artificial Sequence
  Description of Artificial Sequence: Synthetic polypeptide
ILCATYVYVNIRDIDKIYVRTGIYHGGEPLCDNVNTQRVP

SEQ ID NO: 3233 - protein, 40 aa, Artificial Sequence
  Description of Artificial Sequence: Synthetic polypeptide
LWVINSALRIKILCATYVNVNIRDIDKIYVRTGIYHGGVP

SEQ ID NO: 3234 - protein, 40 aa, Artificial Sequence
  Description of Artificial Sequence: Synthetic polypeptide
INSALRIKILCATYVNVNIRDIDKIYVRTGIYHGGVPLCD

SEQ ID NO: 3235 - protein, 40 aa, Artificial Sequence
  Description of Artificial Sequence: Synthetic polypeptide
NSALRIKILCATYVNVNIRDIDKIYVRTGIYHGGVPLCDN

SEQ ID NO: 3236 - protein, 40 aa, Artificial Sequence
  Description of Artificial Sequence: Synthetic polypeptide
LRIKILCATYVNVNIRDIDKIYVRTGIYHGGVPLCDNVNT

SEQ ID NO: 3237 - protein, 40 aa, Artificial Sequence
  Description of Artificial Sequence: Synthetic polypeptide
VNVNIRDIDKIYVRTGIYHGGVPLCDNVNTQRVPCSNPRW

SEQ ID NO: 3238 - protein, 40 aa, Artificial Sequence
  Description of Artificial Sequence: Synthetic polypeptide
RWNEWLNYDIYIPDLPRAARLCLSICSVKGRKGAKEEHRP

SEQ ID NO: 3239 - protein, 40 aa, Artificial Sequence
  Description of Artificial Sequence: Synthetic polypeptide
NYDIYIPDLPRAARLCLSICSVKGRKGAKEEHRPLAWGNI

SEQ ID NO: 3240 - protein, 40 aa, Artificial Sequence
  Description of Artificial Sequence: Synthetic polypeptide
KGRKGAKEEHRPLAWGNINLFDYTDTLVSGKMALNLWPVP

SEQ ID NO: 3241 - protein, 40 aa, Artificial Sequence
  Description of Artificial Sequence: Synthetic polypeptide
RPLAWGNINLFDYTDTLVSGKMALNLWPVPHGLEDLLNPI

SEQ ID NO: 3242 - protein, 40 aa, Artificial Sequence
  Description of Artificial Sequence: Synthetic polypeptide
EDLLNPIGVTGSNPNKETLCLELEFDWFSSVVKFPDMSVI

SEQ ID NO: 3243 - protein, 40 aa, Artificial Sequence
  Description of Artificial Sequence: Synthetic polypeptide
PIGVTGSNPNKETLCLELEFDWFSSVVKFPDMSVIEEHAN

SEQ ID NO: 3244 - protein, 40 aa, Artificial Sequence
  Description of Artificial Sequence: Synthetic polypeptide
GLSNRLARDNELRENDKEQLKAISTRDRLSEITEQEKDFL

SEQ ID NO: 3245 - protein, 40 aa, Artificial Sequence
  Description of Artificial Sequence: Synthetic polypeptide
RDNELRENDKEQLKAISTRDRLSEITEQEKDFLWSHRHYC

SEQ ID NO: 3246 - protein, 40 aa, Artificial Sequence
  Description of Artificial Sequence: Synthetic polypeptide
DRLSEITEQEKDFLWSHRHYCVTIPEILPKLLLSVKWNSR

SEQ ID NO: 3247 - protein, 40 aa, Artificial Sequence
  Description of Artificial Sequence: Synthetic polypeptide
PLSEITAQEKDFLWSHRHYCVTIPEILPKLLLSVKWNSRD

SEQ ID NO: 3248 - protein, 40 aa, Artificial Sequence
  Description of Artificial Sequence: Synthetic polypeptide
TAQEKDFLWSHRHYCVTIPEILPKLLLSVKWNSRDEVAQM

SEQ ID NO: 3249 - protein, 40 aa, Artificial Sequence
  Description of Artificial Sequence: Synthetic polypeptide
DPLSEITKQEKDFLWSHRHYCVTIPEILPKLLLSVKWNSR

SEQ ID NO: 3250 - protein, 40 aa, Artificial Sequence
  Description of Artificial Sequence: Synthetic polypeptide
TKQEKDFLWSHRHYCVTIPEILPKLLLSVKWNSRDEVAQM

SEQ ID NO: 3251 - protein, 40 aa, Artificial Sequence
  Description of Artificial Sequence: Synthetic polypeptide
KQEKDFLWSHRHYCVTIPEILPKLLLSVKWNSRDEVAQMY

SEQ ID NO: 3252 - protein, 40 aa, Artificial Sequence
  Description of Artificial Sequence: Synthetic polypeptide
DPLSEITEREKDFLWSHRHYCVTIPEILPKLLLSVKWNSR

SEQ ID NO: 3253 - protein, 40 aa, Artificial Sequence
  Description of Artificial Sequence: Synthetic polypeptide
PLSEITEREKDFLWSHRHYCVTIPEILPKLLLSVKWNSRD

SEQ ID NO: 3254 - protein, 40 aa, Artificial Sequence
  Description of Artificial Sequence: Synthetic polypeptide
FTQDFLIVISKGAQECTKTREFERFQEMCYKAYLAIRQHA

SEQ ID NO: 3255 - protein, 40 aa, Artificial Sequence
  Description of Artificial Sequence: Synthetic polypeptide
ISREEVNEKLRDTADGTFLVRDASTKMHGDYTLTLRKWGN

SEQ ID NO: 3256 - protein, 40 aa, Artificial Sequence
  Description of Artificial Sequence: Synthetic polypeptide
SREEVNEKLRDTADGTFLVRDASTKMHGDYTLTLRKWGNN

SEQ ID NO: 3257 - protein, 40 aa, Artificial Sequence
  Description of Artificial Sequence: Synthetic polypeptide
RDTADGTFLVRDASTKMHGDYTLTLRKGRNNKLIKIFHRD

SEQ ID NO: 3258 - protein, 40 aa, Artificial Sequence
  Description of Artificial Sequence: Synthetic polypeptide
DASTKMHGDYTLTLRKGRNNKLIKIFHRDGKYGFSDPLTF

SEQ ID NO: 3259 - protein, 40 aa, Artificial Sequence
  Description of Artificial Sequence: Synthetic polypeptide
TKMHGDYTLTLRKGRNNKLIKIFHRDGKYGFSDPLTFSSV

SEQ ID NO: 3260 - protein, 40 aa, Artificial Sequence
  Description of Artificial Sequence: Synthetic polypeptide
MHGDYTLTLRKGRNNKLIKIFHRDGKYGFSDPLTFSSVVE

SEQ ID NO: 3261 - protein, 40 aa, Artificial Sequence
  Description of Artificial Sequence: Synthetic polypeptide
LRKGRNNKLIKIFHRDGKYGFSDPLTFSSVVELINHYRNE

SEQ ID NO: 3262 - protein, 40 aa, Artificial Sequence
  Description of Artificial Sequence: Synthetic polypeptide
LRDTADGTFLVRDASTKMHGDYTLTLRKGGNNELIKIFHR

SEQ ID NO: 3263 - protein, 40 aa, Artificial Sequence
  Description of Artificial Sequence: Synthetic polypeptide
TKMHGDYTLTLRKGGNNELIKIFHRDGKYGFSDPLTFSSV

SEQ ID NO: 3264 - protein, 40 aa, Artificial Sequence
  Description of Artificial Sequence: Synthetic polypeptide
MHGDYTLTLRKGGNNELIKIFHRDGKYGFSDPLTFSSVVE

SEQ ID NO: 3265 - protein, 40 aa, Artificial Sequence
  Description of Artificial Sequence: Synthetic polypeptide
HGDYTLTLRKGGNNELIKIFHRDGKYGFSDPLTFSSVVEL

SEQ ID NO: 3266 - protein, 40 aa, Artificial Sequence
  Description of Artificial Sequence: Synthetic polypeptide
LTLRKGGNNELIKIFHRDGKYGFSDPLTFSSVVELINHYR

SEQ ID NO: 3267 - protein, 40 aa, Artificial Sequence
  Description of Artificial Sequence: Synthetic polypeptide
LRKGGNNELIKIFHRDGKYGFSDPLTFSSVVELINHYRNE

SEQ ID NO: 3268 - protein, 40 aa, Artificial Sequence
  Description of Artificial Sequence: Synthetic polypeptide
MHGDYTLTLRKGGNNNLIKIFHRDGKYGFSDPLTFSSVVE

SEQ ID NO: 3269 - protein, 40 aa, Artificial Sequence
  Description of Artificial Sequence: Synthetic polypeptide
KLKSRISEIIDSRRRLEEDLKKQAAEYPEIDKRMNSIKPD

SEQ ID NO: 3270 - protein, 40 aa, Artificial Sequence
  Description of Artificial Sequence: Synthetic polypeptide
RISEIIDSRRRLEEDLKKQAAEYPEIDKRMNSIKPDLIQL

SEQ ID NO: 3271 - protein, 40 aa, Artificial Sequence
  Description of Artificial Sequence: Synthetic polypeptide
ISEIIDSRRRLEEDLKKQAAEYPEIDKRMNSIKPDLIQLR

SEQ ID NO: 3272 - protein, 40 aa, Artificial Sequence
  Description of Artificial Sequence: Synthetic polypeptide
DSRRRLEEDLKKQAAEYPEIDKRMNSIKPDLIQLRKTRDQ

SEQ ID NO: 3273 - protein, 40 aa, Artificial Sequence
  Description of Artificial Sequence: Synthetic polypeptide
RRLEEDLKKQAAEYPEIDKRMNSIKPDLIQLRKTRDQYLM

SEQ ID NO: 3274 - protein, 40 aa, Artificial Sequence
  Description of Artificial Sequence: Synthetic polypeptide
IQRIMHNYDKLKSRISEIIDSRRRLEEDLKKQAAEYREIG

SEQ ID NO: 3275 - protein, 40 aa, Artificial Sequence
  Description of Artificial Sequence: Synthetic polypeptide
EYREIYKRMNSIKPDLIQLRKTRDQYLMWLTQKGVRQKKL

SEQ ID NO: 3276 - protein, 40 aa, Artificial Sequence
  Description of Artificial Sequence: Synthetic polypeptide
EEDLKKQAAEYREIDKRMNRIKPDLIQLRKTRDQYLMWLT

SEQ ID NO: 3277 - protein, 40 aa, Artificial Sequence
  Description of Artificial Sequence: Synthetic polypeptide
RLEEDLKKQAAEYREIDKRMNSIEPDLIQLRKTRDQYLMW

SEQ ID NO: 3278 - protein, 40 aa, Artificial Sequence
  Description of Artificial Sequence: Synthetic polypeptide
IDSRRRLEEDLKKQAAEYREIDKRMNSIKTDLIQLRKTRD

SEQ ID NO: 3279 - protein, 40 aa, Artificial Sequence
  Description of Artificial Sequence: Synthetic polypeptide
EDLKKQAAEYREIDKRMNSIKTDLIQLRKTRDQYLMWLTQ

SEQ ID NO: 3280 - protein, 40 aa, Artificial Sequence
  Description of Artificial Sequence: Synthetic polypeptide
RAISHEHSPSDLEAHFVPLVKRLAGGDWFTSCTSACGLFS

SEQ ID NO: 3281 - protein, 40 aa, Artificial Sequence
  Description of Artificial Sequence: Synthetic polypeptide
AISHEHSPSDLEAHFVPLVKRLAGGDWFTSCTSACGLFSV

SEQ ID NO: 3282 - protein, 40 aa, Artificial Sequence
  Description of Artificial Sequence: Synthetic polypeptide
ISHEHSPSDLEAHFVPLVKRLAGGDWFTSCTSACGLFSVC

SEQ ID NO: 3283 - protein, 40 aa, Artificial Sequence
  Description of Artificial Sequence: Synthetic polypeptide
SPSDLEAHFVPLVKRLAGGDWFTSCTSACGLFSVCYPRVS

SEQ ID NO: 3284 - protein, 40 aa, Artificial Sequence
  Description of Artificial Sequence: Synthetic polypeptide
PSDLEAHFVPLVKRLAGGDWFTSCTSACGLFSVCYPRVSS

SEQ ID NO: 3285 - protein, 40 aa, Artificial Sequence
  Description of Artificial Sequence: Synthetic polypeptide
FVPLVKRLAGGDWFTSCTSACGLFSVCYPRVSSAVKAELR

SEQ ID NO: 3286 - protein, 40 aa, Artificial Sequence
  Description of Artificial Sequence: Synthetic polypeptide
AGGDWFTSCTSACGLFSVCYPRVSSAVKAELRQYFRNLCS

SEQ ID NO: 3287 - protein, 40 aa, Artificial Sequence
  Description of Artificial Sequence: Synthetic polypeptide
ELRQYFRNLCSDDTPMVRQAAASKLGEFAKVLELDNVKSE

SEQ ID NO: 3288 - protein, 40 aa, Artificial Sequence
  Description of Artificial Sequence: Synthetic polypeptide
QQECKLLYSRKEGQRQENKNKNRCKNILPFDHTRVVLHDG

SEQ ID NO: 3289 - protein, 40 aa, Artificial Sequence
  Description of Artificial Sequence: Synthetic polypeptide
YSRKEGQRQENKNKNRCKNILPFDHTRVVLHDGDPNEPVS

SEQ ID NO: 3290 - protein, 40 aa, Artificial Sequence
  Description of Artificial Sequence: Synthetic polypeptide
SRKEGQRQENKNKNRCKNILPFDHTRVVLHDGDPNEPVSD

SEQ ID NO: 3291 - protein, 40 aa, Artificial Sequence
  Description of Artificial Sequence: Synthetic polypeptide
ENKNKNRCKNILPFDHTRVVLHDGDPNEPVSDYINANIIM

SEQ ID NO: 3292 - protein, 40 aa, Artificial Sequence
  Description of Artificial Sequence: Synthetic polypeptide
GRTGTFIVIDILIDIIREKGVDCDIDVPKTIQMVWSQRSG

SEQ ID NO: 3293 - protein, 40 aa, Artificial Sequence
  Description of Artificial Sequence: Synthetic polypeptide
GTFIVIDILIDIIREKGVDCDIDVPKTIQMVWSQRSGMVQ

SEQ ID NO: 3294 - protein, 40 aa, Artificial Sequence
  Description of Artificial Sequence: Synthetic polypeptide
RTGTFIVIDILIDIIREKGVDCDIDVPKTIQMVRSQRSVM

SEQ ID NO: 3295 - protein, 40 aa, Artificial Sequence
  Description of Artificial Sequence: Synthetic polypeptide
RSQRSGMVQKEAQYRFIYMAVQHYIETLQRRIEEEQKSKR

SEQ ID NO: 3296 - protein, 40 aa, Artificial Sequence
  Description of Artificial Sequence: Synthetic polypeptide
RPSKSNPGDFTLSVRRNGAVTHIKIQNTVDYYDLYGGEKF

SEQ ID NO: 3297 - protein, 40 aa, Artificial Sequence
  Description of Artificial Sequence: Synthetic polypeptide
PSKSNPGDFTLSVRRNGAVTHIKIQNTVDYYDLYGGEKFA

SEQ ID NO: 3298 - protein, 40 aa, Artificial Sequence
  Description of Artificial Sequence: Synthetic polypeptide
KSNPGDFTLSVRRNGAVTHIKIQNTGDYYDLYGGEKLATL

SEQ ID NO: 3299 - protein, 40 aa, Artificial Sequence
  Description of Artificial Sequence: Synthetic polypeptide
KSNPGDFTLSVRRNGAVTHIKIQNTGDYYDLYGGEKFDTL

SEQ ID NO: 3300 - protein, 40 aa, Artificial Sequence
  Description of Artificial Sequence: Synthetic polypeptide
DFTLSVRRNGAVTHIKIQNTGDYYDLYGGEKFATLAALVQ

SEQ ID NO: 3301 - protein, 40 aa, Artificial Sequence
  Description of Artificial Sequence: Synthetic polypeptide
GDFTLSVRRNGAVTHIKIQNTGDYYDLYGGEKFATLAKLV

SEQ ID NO: 3302 - protein, 40 aa, Artificial Sequence
  Description of Artificial Sequence: Synthetic polypeptide
KCVVVGDGAVSKTCLLISYTTNAFPGEYIPTVFDNYSANV

SEQ ID NO: 3303 - protein, 40 aa, Artificial Sequence
  Description of Artificial Sequence: Synthetic polypeptide
DGAVSKTCLLISYTTNAFPGEYIPTVFDNYSANVMVDGKP

SEQ ID NO: 3304 - protein, 40 aa, Artificial Sequence
  Description of Artificial Sequence: Synthetic polypeptide
VSKTCLLISYTTNAFPGEYIPTVFDNYSANVMVDGKPVNL

SEQ ID NO: 3305 - protein, 40 aa, Artificial Sequence
  Description of Artificial Sequence: Synthetic polypeptide
KTYLLISYTTNAFPGEYIPTVFDNYSANVMVDGKPVNLGL

SEQ ID NO: 3306 - protein, 40 aa, Artificial Sequence
  Description of Artificial Sequence: Synthetic polypeptide
VGKTCLLISYTTNAFSGEYIPTVFDNYSANVMVDGKPVNL

SEQ ID NO: 3307 - protein, 40 aa, Artificial Sequence
  Description of Artificial Sequence: Synthetic polypeptide
KTCLLISYTTNAFSGEYIPTVFDNYSANVMVDGKPVNLGL

SEQ ID NO: 3308 - protein, 40 aa, Artificial Sequence
  Description of Artificial Sequence: Synthetic polypeptide
VDGKPVNLGLWDTAGREDYDRLRPLSYPQTVGETYGKDIT

SEQ ID NO: 3309 - protein, 40 aa, Artificial Sequence
  Description of Artificial Sequence: Synthetic polypeptide
GKPVNLGLWDTAGREDYDRLRPLSYPQTVGETYGKDITSR

SEQ ID NO: 3310 - protein, 40 aa, Artificial Sequence
  Description of Artificial Sequence: Synthetic polypeptide
LWDTAGREDYDRLRPLSYPQTVGETYGKDITSRGKDKPIA

SEQ ID NO: 3311 - protein, 40 aa, Artificial Sequence
  Description of Artificial Sequence: Synthetic polypeptide
KPVNLGLWDTAGQEDYDRLHPLSYPQTVGETYGKDITSRG

SEQ ID NO: 3312 - protein, 40 aa, Artificial Sequence
  Description of Artificial Sequence: Synthetic polypeptide
DTAGQEDYDRLHPLSYPQTVGETYGKDITSRGKDKPIADV

SEQ ID NO: 3313 - protein, 40 aa, Artificial Sequence
  Description of Artificial Sequence: Synthetic polypeptide
RLHPLSYPQTVGETYGKDITSRGKDKPIADVFLICFSLVS

SEQ ID NO: 3314 - protein, 40 aa, Artificial Sequence
  Description of Artificial Sequence: Synthetic polypeptide
RIFLHEKLESLLLCTLNDREISMEDEATTLFLATTLASTL

SEQ ID NO: 3315 - protein, 40 aa, Artificial Sequence
  Description of Artificial Sequence: Synthetic polypeptide
EGNLTREMIKHLERCEHRIMESLASLSDSPLFDLIKQSKD

SEQ ID NO: 3316 - protein, 40 aa, Artificial Sequence
  Description of Artificial Sequence: Synthetic polypeptide
IKHLERCEHRIMESLASLSDSPLFDLIKQSKDREGPTDHL

SEQ ID NO: 3317 - protein, 40 aa, Artificial Sequence
  Description of Artificial Sequence: Synthetic polypeptide
RIMESLASLSDSPLFDLIKQSKDREGPTDHLESACPLNLP

SEQ ID NO: 3318 - protein, 40 aa, Artificial Sequence
  Description of Artificial Sequence: Synthetic polypeptide
ESLASLSDSPLFDLIKQSKDREGPTDHLESACPLNLPLQN

SEQ ID NO: 3319 - protein, 40 aa, Artificial Sequence
  Description of Artificial Sequence: Synthetic polypeptide
SLASLSDSPLFDLIKQSKDREGPTDHLESACPLNLPLQNN

SEQ ID NO: 3320 - protein, 40 aa, Artificial Sequence
  Description of Artificial Sequence: Synthetic polypeptide
LASLSDSPLFDLIKQSKDREGPTDHLESACPLNLPLQNNH

SEQ ID NO: 3321 - protein, 40 aa, Artificial Sequence
  Description of Artificial Sequence: Synthetic polypeptide
ASLSDSPLFDLIKQSKDREGPTDHLESACPLNLPLQNNHT

SEQ ID NO: 3322 - protein, 40 aa, Artificial Sequence
  Description of Artificial Sequence: Synthetic polypeptide
FVDSYDPTIENTFTKLITVNGQEYHLQLVVTAGQDEYSIF

SEQ ID NO: 3323 - protein, 40 aa, Artificial Sequence
  Description of Artificial Sequence: Synthetic polypeptide
PTIENTFTKLITVNGQEYHLQLVVTAGQDEYSIFPQTYSI

SEQ ID NO: 3324 - protein, 40 aa, Artificial Sequence
  Description of Artificial Sequence: Synthetic polypeptide
TFTKLITVNGQEYHLQLVVTAGQDEYSIFPQTYSIDINGY

SEQ ID NO: 3325 - protein, 40 aa, Artificial Sequence
  Description of Artificial Sequence: Synthetic polypeptide
TKLITVNGQEYHLQLVVTAGQDEYSIFPQTYSIDINGYIL

SEQ ID NO: 3326 - protein, 40 aa, Artificial Sequence
  Description of Artificial Sequence: Synthetic polypeptide
ITVNGQEYHLQLVVTAGQDEYSIFPQTYSIDINGYILVYS

SEQ ID NO: 3327 - protein, 40 aa, Artificial Sequence
  Description of Artificial Sequence: Synthetic polypeptide
TVNGQEYHLQLVVTAGQDEYSIFPQTYSIDINGYILVYSV

SEQ ID NO: 3328 - protein, 40 aa, Artificial Sequence
  Description of Artificial Sequence: Synthetic polypeptide
GQEYHLQLVVTAGQDEYSIFPQTYSIDINGYILVYSVTSI

SEQ ID NO: 3329 - protein, 40 aa, Artificial Sequence
  Description of Artificial Sequence: Synthetic polypeptide
HLQLVVTAGQDEYSIFPQTYSIDINGYILVYSVTSIKSFE

SEQ ID NO: 3330 - protein, 40 aa, Artificial Sequence
  Description of Artificial Sequence: Synthetic polypeptide
CAKTCLLIVFSKDQFPEVYVPTVFENYVADIEVDGKQVEL

SEQ ID NO: 3331 - protein, 40 aa, Artificial Sequence
  Description of Artificial Sequence: Synthetic polypeptide
ACGKTCLRIVFSKDQFPEVYVPTVFENYVADIEVDGKQVE

SEQ ID NO: 3332 - protein, 40 aa, Artificial Sequence
  Description of Artificial Sequence: Synthetic polypeptide
CLRIVFSKDQFPEVYVPTVFENYVADIEVDGKQVELALWD

SEQ ID NO: 3333 - protein, 40 aa, Artificial Sequence
  Description of Artificial Sequence: Synthetic polypeptide
CGKTCLLIVFSKDQFPEVYVPIVFENYVADIEVDGKQVEL

SEQ ID NO: 3334 - protein, 40 aa, Artificial Sequence
  Description of Artificial Sequence: Synthetic polypeptide
IVFSKDQFPEVYVPIVFENYVADIEVDGKQVELALWDTAG

SEQ ID NO: 3335 - protein, 40 aa, Artificial Sequence
  Description of Artificial Sequence: Synthetic polypeptide
TCLLIVFSKDQFPEVYVPTVFENCVADIEVDGKQVELALW

SEQ ID NO: 3336 - protein, 40 aa, Artificial Sequence
  Description of Artificial Sequence: Synthetic polypeptide
IVFSKDQFPEVYVPTVFENCVADIEVDGKQVELALWDTAG

SEQ ID NO: 3337 - protein, 40 aa, Artificial Sequence
  Description of Artificial Sequence: Synthetic polypeptide
FENCVADIEVDGKQVELALWDTAGQEDYDRLRPLSYPDTD

SEQ ID NO: 3338 - protein, 40 aa, Artificial Sequence
  Description of Artificial Sequence: Synthetic polypeptide
CLLIVFSKDQFPEVYVPTVFENYVADIKVDGKQVELALWD

SEQ ID NO: 3339 - protein, 40 aa, Artificial Sequence
  Description of Artificial Sequence: Synthetic polypeptide
VFENYVADIKVDGKQVELALWDTAGQEDYDRLRPLSYPDT

SEQ ID NO: 3340 - protein, 40 aa, Artificial Sequence
  Description of Artificial Sequence: Synthetic polypeptide
DIKVDGKQVELALWDTAGQEDYDRLRPLSYPDTDVILMCF

SEQ ID NO: 3341 - protein, 40 aa, Artificial Sequence
  Description of Artificial Sequence: Synthetic polypeptide
IKVDGKQVELALWDTAGQEDYDRLRPLSYPDTDVILMCFS

SEQ ID NO: 3342 - protein, 40 aa, Artificial Sequence
  Description of Artificial Sequence: Synthetic polypeptide
IVFSKDQFPEVYVPTVFENYVADIEVDGKQVELALWGTAG

SEQ ID NO: 3343 - protein, 40 aa, Artificial Sequence
  Description of Artificial Sequence: Synthetic polypeptide
NYVADIEVDGKQVELALWGTAGQEDYDRLRPLSYPDTDVI

SEQ ID NO: 3344 - protein, 40 aa, Artificial Sequence
  Description of Artificial Sequence: Synthetic polypeptide
DIEVDGKQVELALWGTAGQEDYDRLRPLSYPDTDVILMCF

SEQ ID NO: 3345 - protein, 40 aa, Artificial Sequence
  Description of Artificial Sequence: Synthetic polypeptide
IEVDGKQVELALWGTAGQEDYDRLRPLSYPDTDVILMCFS

SEQ ID NO: 3346 - protein, 40 aa, Artificial Sequence
  Description of Artificial Sequence: Synthetic polypeptide
VDGKQVELALWGTAGQEDYDRLRPLSYPDTDVILMCFSID

SEQ ID NO: 3347 - protein, 40 aa, Artificial Sequence
  Description of Artificial Sequence: Synthetic polypeptide
DGKQVELALWGTAGQEDYDRLRPLSYPDTDVILMCFSIDS

SEQ ID NO: 3348 - protein, 40 aa, Artificial Sequence
  Description of Artificial Sequence: Synthetic polypeptide
LALWGTAGQEDYDRLRPLSYPDTDVILMCFSIDSPDSLEN

SEQ ID NO: 3349 - protein, 40 aa, Artificial Sequence
  Description of Artificial Sequence: Synthetic polypeptide
CLLIVFSKDQFPEVYVPTVFENYVADIEVDGKQVELALWY

SEQ ID NO: 3350 - protein, 40 aa, Artificial Sequence
  Description of Artificial Sequence: Synthetic polypeptide
YVPTVFENYVADIEVDGKQVELALWYTAGQEDYDRLRPLS

SEQ ID NO: 3351 - protein, 40 aa, Artificial Sequence
  Description of Artificial Sequence: Synthetic polypeptide
NYVADIEVDGKQVELALWYTAGQEDYDRLRPLSYPDTDVI

SEQ ID NO: 3352 - protein, 40 aa, Artificial Sequence
  Description of Artificial Sequence: Synthetic polypeptide
IEVDGKQVELALWYTAGQEDYDRLRPLSYPDTDVILMCFS

SEQ ID NO: 3353 - protein, 40 aa, Artificial Sequence
  Description of Artificial Sequence: Synthetic polypeptide
DGKQVELALWYTAGQEDYDRLRPLSYPDTDVILMCFSIDS

SEQ ID NO: 3354 - protein, 40 aa, Artificial Sequence
  Description of Artificial Sequence: Synthetic polypeptide
VELALWYTAGQEDYDRLRPLSYPDTDVILMCFSIDSPDSL

SEQ ID NO: 3355 - protein, 40 aa, Artificial Sequence
  Description of Artificial Sequence: Synthetic polypeptide
VYVPTVFENYVADIEVDGKQVELALWDKAGQEDYDRLRPL

SEQ ID NO: 3356 - protein, 40 aa, Artificial Sequence
  Description of Artificial Sequence: Synthetic polypeptide
DIEVDGKQVELALWDKAGQEDYDRLRPLSYPDTDVILMCF

SEQ ID NO: 3357 - protein, 40 aa, Artificial Sequence
  Description of Artificial Sequence: Synthetic polypeptide
IEVDGKQVELALWDKAGQEDYDRLRPLSYPDTDVILMCFS

SEQ ID NO: 3358 - protein, 40 aa, Artificial Sequence
  Description of Artificial Sequence: Synthetic polypeptide
DGKQVELALWDKAGQEDYDRLRPLSYPDTDVILMCFSIDS

SEQ ID NO: 3359 - protein, 40 aa, Artificial Sequence
  Description of Artificial Sequence: Synthetic polypeptide
VDGKQVELALWDTDGQEDYDRLRPLSYPDTDVILMCFSID

SEQ ID NO: 3360 - protein, 40 aa, Artificial Sequence
  Description of Artificial Sequence: Synthetic polypeptide
LALWDTDGQEDYDRLRPLSYPDTDVILMCFSIDSPDSLEN

SEQ ID NO: 3361 - protein, 40 aa, Artificial Sequence
  Description of Artificial Sequence: Synthetic polypeptide
PEVYVPTVFENYVADIEVDGKQVELALWDTAEQEDYDRLR

SEQ ID NO: 3362 - protein, 40 aa, Artificial Sequence
  Description of Artificial Sequence: Synthetic polypeptide
NYVADIEVDGKQVELALWDTAEQEDYDRLRPLSYPDTDVI

SEQ ID NO: 3363 - protein, 40 aa, Artificial Sequence
  Description of Artificial Sequence: Synthetic polypeptide
DIEVDGKQVELALWDTAEQEDYDRLRPLSYPDTDVILMCF

SEQ ID NO: 3364 - protein, 40 aa, Artificial Sequence
  Description of Artificial Sequence: Synthetic polypeptide
IEVDGKQVELALWDTAEQEDYDRLRPLSYPDTDVILMCFS

SEQ ID NO: 3365 - protein, 40 aa, Artificial Sequence
  Description of Artificial Sequence: Synthetic polypeptide
DIEVDGKQVELALWDTARQEDYDRLRPLSYPDTDVILMCF

SEQ ID NO: 3366 - protein, 40 aa, Artificial Sequence
  Description of Artificial Sequence: Synthetic polypeptide
IEVDGKQVELALWDTARQEDYDRLRPLSYPDTDVILMCFS

SEQ ID NO: 3367 - protein, 40 aa, Artificial Sequence
  Description of Artificial Sequence: Synthetic polypeptide
LALWDTARQEDYDRLRPLSYPDTDVILMCFSIDSPDSLEN

SEQ ID NO: 3368 - protein, 40 aa, Artificial Sequence
  Description of Artificial Sequence: Synthetic polypeptide
YVPTVFENYVADIEVDGKQVELALWDTAGKEDYDRLRPLS

SEQ ID NO: 3369 - protein, 40 aa, Artificial Sequence
  Description of Artificial Sequence: Synthetic polypeptide
DIEVDGKQVELALWDTAGKEDYDRLRPLSYPDTDVILMCF

SEQ ID NO: 3370 - protein, 40 aa, Artificial Sequence
  Description of Artificial Sequence: Synthetic polypeptide
IEVDGKQVELALWDTAGKEDYDRLRPLSYPDTDVILMCFS

SEQ ID NO: 3371 - protein, 40 aa, Artificial Sequence
  Description of Artificial Sequence: Synthetic polypeptide
VDGKQVELALWDTAGKEDYDRLRPLSYPDTDVILMCFSID

SEQ ID NO: 3372 - protein, 40 aa, Artificial Sequence
  Description of Artificial Sequence: Synthetic polypeptide
VELALWDTAGKEDYDRLRPLSYPDTDVILMCFSIDSPDSL

SEQ ID NO: 3373 - protein, 40 aa, Artificial Sequence
  Description of Artificial Sequence: Synthetic polypeptide
LALWDTAGKEDYDRLRPLSYPDTDVILMCFSIDSPDSLEN

SEQ ID NO: 3374 - protein, 40 aa, Artificial Sequence
  Description of Artificial Sequence: Synthetic polypeptide
KEDYDRLRPLSYPDTDVILMCFSIDSPDSLENIPEKWTPE

SEQ ID NO: 3375 - protein, 40 aa, Artificial Sequence
  Description of Artificial Sequence: Synthetic polypeptide
VFENYVADIEVDGKQVELALWDTAGQEDYDRLSPLSYPDT

SEQ ID NO: 3376 - protein, 40 aa, Artificial Sequence
  Description of Artificial Sequence: Synthetic polypeptide
NYVADIEVDGKQVELALWDTAGQEDYDRLSPLSYPDTDVI

SEQ ID NO: 3377 - protein, 40 aa, Artificial Sequence
  Description of Artificial Sequence: Synthetic polypeptide
DIEVDGKQVELALWDTAGQEDYDRLSPLSYPDTDVILMCF

SEQ ID NO: 3378 - protein, 40 aa, Artificial Sequence
  Description of Artificial Sequence: Synthetic polypeptide
QEDYDRLSPLSYPDTDVILMCFSIDSPDSLENIPEKWTPE

SEQ ID NO: 3379 - protein, 40 aa, Artificial Sequence
  Description of Artificial Sequence: Synthetic polypeptide
DYDRLSPLSYPDTDVILMCFSIDSPDSLENIPEKWTPEVK

SEQ ID NO: 3380 - protein, 40 aa, Artificial Sequence
  Description of Artificial Sequence: Synthetic polypeptide
DIEVDGKQVELALWDTAGQEDYDRLRPLPYPDTDVILMCF

SEQ ID NO: 3381 - protein, 40 aa, Artificial Sequence
  Description of Artificial Sequence: Synthetic polypeptide
VDGKQVELALWDTAGQEDYDRLRPLPYPDTDVILMCFSID

SEQ ID NO: 3382 - protein, 40 aa, Artificial Sequence
  Description of Artificial Sequence: Synthetic polypeptide
LALWDTAGQEDYDRLRPLPYPDTDVILMCFSIDSPDSLEN

SEQ ID NO: 3383 - protein, 40 aa, Artificial Sequence
  Description of Artificial Sequence: Synthetic polypeptide
GQEDYDRLRPLPYPDTDVILMCFSIDSPDSLENIPEKWTP

SEQ ID NO: 3384 - protein, 40 aa, Artificial Sequence
  Description of Artificial Sequence: Synthetic polypeptide
EDYDRLRPLPYPDTDVILMCFSIDSPDSLENIPEKWTPEV

SEQ ID NO: 3385 - protein, 40 aa, Artificial Sequence
  Description of Artificial Sequence: Synthetic polypeptide
FKARVKEYARNKNIHYYFMALKNDEIIDATQKGNCSCFMN

SEQ ID NO: 3386 - protein, 40 aa, Artificial Sequence
  Description of Artificial Sequence: Synthetic polypeptide
KARVKEYARNKNIHYYFMALKNDEIIDATQKGNCSCFMNH

SEQ ID NO: 3387 - protein, 40 aa, Artificial Sequence
  Description of Artificial Sequence: Synthetic polypeptide
VKEYARNKNIHYYFMALKNDEIIDATQKGNCSCFMNHSCE

SEQ ID NO: 3388 - protein, 40 aa, Artificial Sequence
  Description of Artificial Sequence: Synthetic polypeptide
YARNKNIHYYFMALKNDEIIDATQKGNCSCFMNHSCEPNC

SEQ ID NO: 3389 - protein, 40 aa, Artificial Sequence
  Description of Artificial Sequence: Synthetic polypeptide
KARVKEYARNKNIHYYFMALKNDEIIDATQKGNCSLFMNH

SEQ ID NO: 3390 - protein, 40 aa, Artificial Sequence
  Description of Artificial Sequence: Synthetic polypeptide
RVKEYARNKNIHYYFMALKNDEIIDATQKGNCSLFMNHSC

SEQ ID NO: 3391 - protein, 40 aa, Artificial Sequence
  Description of Artificial Sequence: Synthetic polypeptide
VKEYARNKNIHYYFMALKNDEIIDATQKGNCSLFMNHSCE

SEQ ID NO: 3392 - protein, 40 aa, Artificial Sequence
  Description of Artificial Sequence: Synthetic polypeptide
KARVKEYARNKNIHYYFMALKNDEIIDATQKGNCSRFMTH

SEQ ID NO: 3393 - protein, 40 aa, Artificial Sequence
  Description of Artificial Sequence: Synthetic polypeptide
VKEYARNKNIHYYFMALKNDEIIDATQKGNCSRFMTHSCE

SEQ ID NO: 3394 - protein, 40 aa, Artificial Sequence
  Description of Artificial Sequence: Synthetic polypeptide
GLATMISTMRPDIDNMDQYVRNTTARAFAVVASALGIPSL

SEQ ID NO: 3395 - protein, 40 aa, Artificial Sequence
  Description of Artificial Sequence: Synthetic polypeptide
LATMISTMRPDIDNMDQYVRNTTARAFAVVASALGIPSLL

SEQ ID NO: 3396 - protein, 40 aa, Artificial Sequence
  Description of Artificial Sequence: Synthetic polypeptide
GLATMISTMRPDIDNMDEYVCNTTARAFAVVASALGIPSL

SEQ ID NO: 3397 - protein, 40 aa, Artificial Sequence
  Description of Artificial Sequence: Synthetic polypeptide
LATMISTMRPDIDNMDEYVCNTTARAFAVVASALGIPSLL

SEQ ID NO: 3398 - protein, 40 aa, Artificial Sequence
  Description of Artificial Sequence: Synthetic polypeptide
PSLLPFLKAVCKSKKSWQARHTGINIVQQIAILMGCAILP

SEQ ID NO: 3399 - protein, 40 aa, Artificial Sequence
  Description of Artificial Sequence: Synthetic polypeptide
TGIKIVQQIAILMGCAILPHLRSLVEIIEHGLVDEQQEVR

SEQ ID NO: 3400 - protein, 40 aa, Artificial Sequence
  Description of Artificial Sequence: Synthetic polypeptide
AALAEAATPYGIESFDSVLKPLWKGIRQHRGEGLAAFLKA

SEQ ID NO: 3401 - protein, 40 aa, Artificial Sequence
  Description of Artificial Sequence: Synthetic polypeptide
LAEAATPYGIESFDSVLKPLWKGIRQHRGKGLAAVLKAIG

SEQ ID NO: 3402 - protein, 40 aa, Artificial Sequence
  Description of Artificial Sequence: Synthetic polypeptide
AVLKAIGYLIPLMDAEYANYYTREVMLILIREFQSPDEEM

SEQ ID NO: 3403 - protein, 40 aa, Artificial Sequence
  Description of Artificial Sequence: Synthetic polypeptide
METIEKIMGNLGAADIDHKLEEQLIDGILYAFQGQTTEDS

SEQ ID NO: 3404 - protein, 40 aa, Artificial Sequence
  Description of Artificial Sequence: Synthetic polypeptide
TIEKIMGNLGAADIDHKLEEQLIDGILYAFQGQTTEDSVM

SEQ ID NO: 3405 - protein, 40 aa, Artificial Sequence
  Description of Artificial Sequence: Synthetic polypeptide
IMGNLGAADIDHKLEEQLIDGILYAFQKQTTEDSVMLNGF

SEQ ID NO: 3406 - protein, 40 aa, Artificial Sequence
  Description of Artificial Sequence: Synthetic polypeptide
AADIDHKLEEQLIDGILYAFQKQTTEDSVMLNGFGTVVNA

SEQ ID NO: 3407 - protein, 40 aa, Artificial Sequence
  Description of Artificial Sequence: Synthetic polypeptide
ADIDHKLEEQLIDGILYAFQKQTTEDSVMLNGFGTVVNAL

SEQ ID NO: 3408 - protein, 40 aa, Artificial Sequence
  Description of Artificial Sequence: Synthetic polypeptide
KIMGNLGAADIDHKLEEQLIDGILYAFQEPTTEDSVMLNG

SEQ ID NO: 3409 - protein, 40 aa, Artificial Sequence
  Description of Artificial Sequence: Synthetic polypeptide
IMGNLGAADIDHKLEEQLIDGILYAFQEPTTEDSVMLNGF

SEQ ID NO: 3410 - protein, 40 aa, Artificial Sequence
  Description of Artificial Sequence: Synthetic polypeptide
ADIDHKLEEQLIDGILYAFQEPTTEDSVMLNGFGTVVNAL

SEQ ID NO: 3411 - protein, 40 aa, Artificial Sequence
  Description of Artificial Sequence: Synthetic polypeptide
SIAYFEMDVQVGETLKVPSSCPIVTVDGYVDPSGGDRFCL

SEQ ID NO: 3412 - protein, 40 aa, Artificial Sequence
  Description of Artificial Sequence: Synthetic polypeptide
NHPAPEYWCSIAYFEMDVQVGETFKVPSSCPIVTVDRYVD

SEQ ID NO: 3413 - protein, 40 aa, Artificial Sequence
  Description of Artificial Sequence: Synthetic polypeptide
CSIAYFEMDVQVGETFKVPSSCPIVTVDGCVDPSGGDRFC

SEQ ID NO: 3414 - protein, 40 aa, Artificial Sequence
  Description of Artificial Sequence: Synthetic polypeptide
PAPEYWCSIAYFEMDVQVGETFKVPSSCPIVTVDGYVVPS

SEQ ID NO: 3415 - protein, 40 aa, Artificial Sequence
  Description of Artificial Sequence: Synthetic polypeptide
CSIAYFEMDVQVGETFKVPSSCPIVTVDGYVVPSGGDRFC

SEQ ID NO: 3416 - protein, 40 aa, Artificial Sequence
  Description of Artificial Sequence: Synthetic polypeptide
NHPAPEYWCSIAYFEMDVQVGETFKVPSSCPIVTVDGYVY

SEQ ID NO: 3417 - protein, 40 aa, Artificial Sequence
  Description of Artificial Sequence: Synthetic polypeptide
PEYWCSIAYFEMDVQVGETFKVPSSCPIVTVDGYVYPSGG

SEQ ID NO: 3418 - protein, 40 aa, Artificial Sequence
  Description of Artificial Sequence: Synthetic polypeptide
APEYWCSIAYFEMDVQVGETFKVPSSCPIVTVDGYVDLSG

SEQ ID NO: 3419 - protein, 40 aa, Artificial Sequence
  Description of Artificial Sequence: Synthetic polypeptide
AYFEMDVQVGETFKVPSSCPIVTVDGYVDPSGGDHFCLGQ

SEQ ID NO: 3420 - protein, 40 aa, Artificial Sequence
  Description of Artificial Sequence: Synthetic polypeptide
GYVDPSGGDRFCLGKLSNVHRTEAIERARLHIGKGVQLEC

SEQ ID NO: 3421 - protein, 40 aa, Artificial Sequence
  Description of Artificial Sequence: Synthetic polypeptide
LCNVHRTEAIERARLHIGKGVQLECKGEGDVWVRCLSDHA

SEQ ID NO: 3422 - protein, 40 aa, Artificial Sequence
  Description of Artificial Sequence: Synthetic polypeptide
RTEAIERARLDIGKGVQLECKGEGDVWVRCLSDHAVFVQS

SEQ ID NO: 3423 - protein, 40 aa, Artificial Sequence
  Description of Artificial Sequence: Synthetic polypeptide
VHRTEAIERARLHIDKGVQLECKGEGDVWVRCLSDHAVFV

SEQ ID NO: 3424 - protein, 40 aa, Artificial Sequence
  Description of Artificial Sequence: Synthetic polypeptide
IERARLHIGKSVQLECKGEGDVWVRCLSDHAVFVQSYYLD

SEQ ID NO: 3425 - protein, 40 aa, Artificial Sequence
  Description of Artificial Sequence: Synthetic polypeptide
VHRTEAIERARLHIGKVVQLECKGEGDVWVRCLSDHAVFV

SEQ ID NO: 3426 - protein, 40 aa, Artificial Sequence
  Description of Artificial Sequence: Synthetic polypeptide
RTEAIERARLHIGKVVQLECKGEGDVWVRCLSDHAVFVQS

SEQ ID NO: 3427 - protein, 40 aa, Artificial Sequence
  Description of Artificial Sequence: Synthetic polypeptide
FVQGKDGGFKKFIRRDFLLDEANGLLPDDKLTLFCEVSVV

SEQ ID NO: 3428 - protein, 40 aa, Artificial Sequence
  Description of Artificial Sequence: Synthetic polypeptide
TYQGSYGFRLGFLHSGTAKYVTCTYSPALNKMFCQLAKTC

SEQ ID NO: 3429 - protein, 40 aa, Artificial Sequence
  Description of Artificial Sequence: Synthetic polypeptide
YGFRLGFLHSGTAKSVTCTSSPALNKMFCQLAKTCPVQLW

SEQ ID NO: 3430 - protein, 40 aa, Artificial Sequence
  Description of Artificial Sequence: Synthetic polypeptide
PSQKTYQGSYGFRLGFLHSGTAKSVTCTYPPALNKMFCQL

SEQ ID NO: 3431 - protein, 40 aa, Artificial Sequence
  Description of Artificial Sequence: Synthetic polypeptide
QGSYGFRLGFLHSGTAKSVTCTYSPALNKMFCQLVKTCPV

SEQ ID NO: 3432 - protein, 40 aa, Artificial Sequence
  Description of Artificial Sequence: Synthetic polypeptide
HHEHCSDSDGLAPPQHLIRVEGNLRVEYLDDRNTFRHSVV

SEQ ID NO: 3433 - protein, 40 aa, Artificial Sequence
  Description of Artificial Sequence: Synthetic polypeptide
APPQHFIRVEGNLRVEYLDDRNTFRHSVVVPYEPPEVGSD

SEQ ID NO: 3434 - protein, 40 aa, Artificial Sequence
  Description of Artificial Sequence: Synthetic polypeptide
LAPPQHLFRVEGNLRVEYLDDRNTFRHSVVVPYEPPEVGS

SEQ ID NO: 3435 - protein, 40 aa, Artificial Sequence
  Description of Artificial Sequence: Synthetic polypeptide
SDGLAPPQHLIRVEGNLRVEYLDGRNTFRHSVVVPYEPPE

SEQ ID NO: 3436 - protein, 40 aa, Artificial Sequence
  Description of Artificial Sequence: Synthetic polypeptide
LAPPQHLIRVEGNLRVEYLDGRNTFRHSVVVPYEPPEVGS

SEQ ID NO: 3437 - protein, 40 aa, Artificial Sequence
  Description of Artificial Sequence: Synthetic polypeptide
LAPPQHLIRVEGNLRVEYLDDRNTFLHSVVVPYEPPEVGS

SEQ ID NO: 3438 - protein, 40 aa, Artificial Sequence
  Description of Artificial Sequence: Synthetic polypeptide
LAPPQHLIRVEGNLRVEYLDDRNTFRHIVVVPYEPPEVGS

SEQ ID NO: 3439 - protein, 40 aa, Artificial Sequence
  Description of Artificial Sequence: Synthetic polypeptide
PPGSTKRALPNNTSSSPQPKKKPLDGEYFTLQIRGREHFE

SEQ ID NO: 3440 - protein, 40 aa, Artificial Sequence
  Description of Artificial Sequence: Synthetic polypeptide
DGLLVYQTELFVPSLNVDGQPIFANITLPVYTLKERCLQV

SEQ ID NO: 3441 - protein, 40 aa, Artificial Sequence
  Description of Artificial Sequence: Synthetic polypeptide
VNQTELFVPSLNVDGQPIFANNTLPVYTLKERCLQVVRSL

SEQ ID NO: 3442 - protein, 40 aa, Artificial Sequence
  Description of Artificial Sequence: Synthetic polypeptide
QTELFVPSLNVDGQPIFANITLPVYTLKEQCLQVVRSLVK

SEQ ID NO: 3443 - protein, 40 aa, Artificial Sequence
  Description of Artificial Sequence: Synthetic polypeptide
HSGNGTFVNTELVGKGKRRPLNNNSEIALSLSRNKVFVFF

SEQ ID NO: 3444 - protein, 40 aa, Artificial Sequence
  Description of Artificial Sequence: Synthetic polypeptide
GTFVNTELVGKGKRRPLNNNSEIALSLSRNKVFVFFDLTV

SEQ ID NO: 3445 - protein, 40 aa, Artificial Sequence
  Description of Artificial Sequence: Synthetic polypeptide
QSKGRARAPISNYIMLADTDKIKSFEEDLKTYKAIEKILR

SEQ ID NO: 3446 - protein, 40 aa, Artificial Sequence
  Description of Artificial Sequence: Synthetic polypeptide
SKGRARAPISNYIMLADTDKIKSFEEDLKTYKAIEKILRN

SEQ ID NO: 3447 - protein, 40 aa, Artificial Sequence
  Description of Artificial Sequence: Synthetic polypeptide
KGRARAPISNYIMLADTDKIKSFEEDLKTYKAIEKILRNK

SEQ ID NO: 3448 - protein, 40 aa, Artificial Sequence
  Description of Artificial Sequence: Synthetic polypeptide
ISGNKNLCYANTINWKKLFGTSGQKTKIISNRGENSCKAT

SEQ ID NO: 3449 - protein, 40 aa, Artificial Sequence
  Description of Artificial Sequence: Synthetic polypeptide
IGGLFILVIVGLTFAVYVRRKSIKKKRALRRFLETELVEP

SEQ ID NO: 3450 - protein, 40 aa, Artificial Sequence
  Description of Artificial Sequence: Synthetic polypeptide
PSGTAPNQAQLRILKETELKRVKVLGSGAFGTVYKGIWVP

SEQ ID NO: 3451 - protein, 40 aa, Artificial Sequence
  Description of Artificial Sequence: Synthetic polypeptide
RILKETELKRVKVLGSGAFGTVYKGIWVPEGETVKIPVAI

SEQ ID NO: 3452 - protein, 40 aa, Artificial Sequence
  Description of Artificial Sequence: Synthetic polypeptide
ETSAKTRQGVDDAFYTLVREIRKHKEKMSKDGKKKKKKSK

SEQ ID NO: 3453 - protein, 40 aa, Artificial Sequence
  Description of Artificial Sequence: Synthetic polypeptide
ETLVRPKPLLLKLLKSVGAQKDTYTMKEVLFYLGQYIMTK

SEQ ID NO: 3454 - protein, 40 aa, Artificial Sequence
  Description of Artificial Sequence: Synthetic polypeptide
MVRPKPLLLKLLKSVGAQKDTYTMKEVLFYLGQYIMTKRL

SEQ ID NO: 3455 - protein, 40 aa, Artificial Sequence
  Description of Artificial Sequence: Synthetic polypeptide
VRPKPLLLKLLKSVGAQKDTYTMKEVLFYLGQYIMTKRLY

SEQ ID NO: 3456 - protein, 40 aa, Artificial Sequence
  Description of Artificial Sequence: Synthetic polypeptide
HTRIIRFCSINSGLHSYMEMPLECILTEKRKKRSTKKEVF

SEQ ID NO: 3457 - protein, 40 aa, Artificial Sequence
  Description of Artificial Sequence: Synthetic polypeptide
RFCSINSGLHSYMEMPLECILTEKRKKRSTKKEVFNILQA

SEQ ID NO: 3458 - protein, 40 aa, Artificial Sequence
  Description of Artificial Sequence: Synthetic polypeptide
HKKTGTTVPESIHSFIGDGLVKPEALNKKAIQIINRVRDK

SEQ ID NO: 3459 - protein, 40 aa, Artificial Sequence
  Description of Artificial Sequence: Synthetic polypeptide
QFNEAQLALIRDIRRRGKNKVAAQNCRKRKLENIVELEQD

SEQ ID NO: 3460 - protein, 40 aa, Artificial Sequence
  Description of Artificial Sequence: Synthetic polypeptide
FNEAQLALIRDIRRRGKNKVAAQNCRKRKLENIVELEQDL

SEQ ID NO: 3461 - protein, 40 aa, Artificial Sequence
  Description of Artificial Sequence: Synthetic polypeptide
FWHLKSEMHNKTVSQRFGLLLESYCRACGMYLKHLNRQVE

SEQ ID NO: 3462 - protein, 40 aa, Artificial Sequence
  Description of Artificial Sequence: Synthetic polypeptide
MHNKTVSQRFGLLLESYCRACGMYLKHLNRQVEAMEKLIN

SEQ ID NO: 3463 - protein, 40 aa, Artificial Sequence
  Description of Artificial Sequence: Synthetic polypeptide
HIDFGHFLDHKKKKFGYKRERVPFVLTQDFLIVISKGAQE

SEQ ID NO: 3464 - protein, 40 aa, Artificial Sequence
  Description of Artificial Sequence: Synthetic polypeptide
RGKSKCVKYWPDEYALKEYGVMRVRNVKESAAHDYTLREL

SEQ ID NO: 3465 - protein, 40 aa, Artificial Sequence
  Description of Artificial Sequence: Synthetic polypeptide
MHDCLMKALKVRGLQPECCAVFRLLHEHKGKKARLDWNTD

SEQ ID NO: 3466 - protein, 40 aa, Artificial Sequence
  Description of Artificial Sequence: Synthetic polypeptide
LMKALKVRGLQPECCAVFRLLHEHKGKKARLDWNTDAASL

SEQ ID NO: 3467 - protein, 40 aa, Artificial Sequence
  Description of Artificial Sequence: Synthetic polypeptide
MKALKVRGLQPECCAVFRLLHEHKGKKARLDWNTDAASLI

SEQ ID NO: 3468 - protein, 40 aa, Artificial Sequence
  Description of Artificial Sequence: Synthetic polypeptide
SDRRPGSFVLSFLSQMNVVNHFRIIAMCGDYYIGGRRFSS

SEQ ID NO: 3469 - protein, 40 aa, Artificial Sequence
  Description of Artificial Sequence: Synthetic polypeptide
DRRPGSFVLSFLSQMNVVNHFRIIAMCGDYYIGGRRFSSL

SEQ ID NO: 3470 - protein, 40 aa, Artificial Sequence
  Description of Artificial Sequence: Synthetic polypeptide
GKEIYNTIRRKTKDAFYKNIVKKGYLLKKGKGKRWKNLYF

SEQ ID NO: 3471 - protein, 40 aa, Artificial Sequence
  Description of Artificial Sequence: Synthetic polypeptide
EIYNTIRRKTKDAFYKNIVKKGYLLKKGKGKRWKNLYFIL

SEQ ID NO: 3472 - protein, 40 aa, Artificial Sequence
  Description of Artificial Sequence: Synthetic polypeptide
IYNTIRRKTKDAFYKNIVKKGYLLKKGKGKRWKNLYFILE

SEQ ID NO: 3473 - protein, 40 aa, Artificial Sequence
  Description of Artificial Sequence: Synthetic polypeptide
YNTIRRKTKDAFYKNIVKKGYLLKKGKGKRWKNLYFILEG

SEQ ID NO: 3474 - protein, 40 aa, Artificial Sequence
  Description of Artificial Sequence: Synthetic polypeptide
NTIRRKTKDAFYKNIVKKGYLLKKGKGKRWKNLYFILEGS

SEQ ID NO: 3475 - protein, 40 aa, Artificial Sequence
  Description of Artificial Sequence: Synthetic polypeptide
TIRRKTKDAFYKNIVKKGYLLKKGKGKRWKNLYFILEGSD

SEQ ID NO: 3476 - protein, 40 aa, Artificial Sequence
  Description of Artificial Sequence: Synthetic polypeptide
RKTKDAFYKNIVKKGYLLKKGKGKRWKNLYFILEGSDAQL

SEQ ID NO: 3477 - protein, 40 aa, Artificial Sequence
  Description of Artificial Sequence: Synthetic polypeptide
KTKDAFYKNIVKKGYLLKKGKGKRWKNLYFILEGSDAQLI

SEQ ID NO: 3478 - protein, 40 aa, Artificial Sequence
  Description of Artificial Sequence: Synthetic polypeptide
TKDAFYKNIVKKGYLLKKGKGKRWKNLYFILEGSDAQLIY

SEQ ID NO: 3479 - protein, 40 aa, Artificial Sequence
  Description of Artificial Sequence: Synthetic polypeptide
KDAFYKNIVKKGYLLKKGKGKRWKNLYFILEGSDAQLIYF

SEQ ID NO: 3480 - protein, 40 aa, Artificial Sequence
  Description of Artificial Sequence: Synthetic polypeptide
DAFYKNIVKKGYLLKKGKGKRWKNLYFILEGSDAQLIYFE

SEQ ID NO: 3481 - protein, 40 aa, Artificial Sequence
  Description of Artificial Sequence: Synthetic polypeptide
AFYKNIVKKGYLLKKGKGKRWKNLYFILEGSDAQLIYFES

SEQ ID NO: 3482 - protein, 40 aa, Artificial Sequence
  Description of Artificial Sequence: Synthetic polypeptide
FYKNIVKKGYLLKKGKGKRWKNLYFILEGSDAQLIYFESE

SEQ ID NO: 3483 - protein, 40 aa, Artificial Sequence
  Description of Artificial Sequence: Synthetic polypeptide
KNIVKKGYLLKKGKGKRWKNLYFILEGSDAQLIYFESEKR

SEQ ID NO: 3484 - protein, 40 aa, Artificial Sequence
  Description of Artificial Sequence: Synthetic polypeptide
NIVKKGYLLKKGKGKRWKNLYFILEGSDAQLIYFESEKRA

SEQ ID NO: 3485 - protein, 40 aa, Artificial Sequence
  Description of Artificial Sequence: Synthetic polypeptide
KKGYLLKKGKGKRWKNLYFILEGSDAQLIYFESEKRATKP

SEQ ID NO: 3486 - protein, 40 aa, Artificial Sequence
  Description of Artificial Sequence: Synthetic polypeptide
GKGKRWKNLYFILEGSDAQLIYFESEKRATKPKGLIDLSV

SEQ ID NO: 3487 - protein, 40 aa, Artificial Sequence
  Description of Artificial Sequence: Synthetic polypeptide
LRKSSPGTSNKRLRQVSSLVLHIEEAHKLPVKHFTNPYCN

SEQ ID NO: 3488 - protein, 40 aa, Artificial Sequence
  Description of Artificial Sequence: Synthetic polypeptide
LPPDINRFEITLSNKTKKSKDPDILFMRCQLSRLQKGHAT

SEQ ID NO: 3489 - protein, 40 aa, Artificial Sequence
  Description of Artificial Sequence: Synthetic polypeptide
INRFEITLSNKTKKSKDPDILFMRCQLSRLQKGHATDEWF

SEQ ID NO: 3490 - protein, 40 aa, Artificial Sequence
  Description of Artificial Sequence: Synthetic polypeptide
NRFEITLSNKTKKSKDPDILFMRCQLSRLQKGHATDEWFL

SEQ ID NO: 3491 - protein, 40 aa, Artificial Sequence
  Description of Artificial Sequence: Synthetic polypeptide
RFEITLSNKTKKSKDPDILFMRCQLSRLQKGHATDEWFLL

SEQ ID NO: 3492 - protein, 40 aa, Artificial Sequence
  Description of Artificial Sequence: Synthetic polypeptide
VHKFFNLLKEIDTSTKVDNAMSRLLKKYDVLFALFSKLER

SEQ ID NO: 3493 - protein, 40 aa, Artificial Sequence
  Description of Artificial Sequence: Synthetic polypeptide
VNPKESILKRVKDIGYIFKEKFAKAVGQGCVEIGSQRYKL

SEQ ID NO: 3494 - protein, 40 aa, Artificial Sequence
  Description of Artificial Sequence: Synthetic polypeptide
QKPLKSTSLSLFYKKVYRLAYLRLNTLCERLLSEHPELEH

SEQ ID NO: 3495 - protein, 40 aa, Artificial Sequence
  Description of Artificial Sequence: Synthetic polypeptide
GQQLARQLKVTYMEASAKIRMNVDQAFHELVRVIRKFQEQ

SEQ ID NO: 3496 - protein, 40 aa, Artificial Sequence
  Description of Artificial Sequence: Synthetic polypeptide
PYGIESFDSVLKPLWKGIRQHRGKGLAAFLKAIGYLIPLM

SEQ ID NO: 3497 - protein, 40 aa, Artificial Sequence
  Description of Artificial Sequence: Synthetic polypeptide
YGIESFDSVLKPLWKGIRQHRGKGLAAFLKAIGYLIPLMD

SEQ ID NO: 3498 - protein, 40 aa, Artificial Sequence
  Description of Artificial Sequence: Synthetic polypeptide
SVLKPLWKGIRQHRGKGLAAFLKAIGYLIPLMDAEYANYY

SEQ ID NO: 3499 - protein, 40 aa, Artificial Sequence
  Description of Artificial Sequence: Synthetic polypeptide
VIQNPGPRHPEAASAAPPGASLLLLQQQQQQQQQQQQQQQ

SEQ ID NO: 3500 - protein, 40 aa, Artificial Sequence
  Description of Artificial Sequence: Synthetic polypeptide
ALSGGGGGGAEPGQALFNGDMEPEAGAGAGAAASSAADPA

SEQ ID NO: 3501 - protein, 40 aa, Artificial Sequence
  Description of Artificial Sequence: Synthetic polypeptide
MSGGGGGGAEPGQALFNGDMEPEAGAGAGAAASSAADPAI

SEQ ID NO: 3502 - protein, 40 aa, Artificial Sequence
  Description of Artificial Sequence: Synthetic polypeptide
SGGGGGGAEPGQALFNGDMEPEAGAGAGAAASSAADPAIP

SEQ ID NO: 3503 - protein, 40 aa, Artificial Sequence
  Description of Artificial Sequence: Synthetic polypeptide
GGGGGAEPGQALFNGDMEPEAGAGAGAAASSAADPAIPEE

SEQ ID NO: 3504 - protein, 40 aa, Artificial Sequence
  Description of Artificial Sequence: Synthetic polypeptide
GGGGAEPGQALFNGDMEPEAGAGAGAAASSAADPAIPEEV

SEQ ID NO: 3505 - protein, 40 aa, Artificial Sequence
  Description of Artificial Sequence: Synthetic polypeptide
GGAEPGQALFNGDMEPEAGAGAGAAASSAADPAIPEEVWN

SEQ ID NO: 3506 - protein, 40 aa, Artificial Sequence
  Description of Artificial Sequence: Synthetic polypeptide
GAEPGQALFNGDMEPEAGAGAGAAASSAADPAIPEEVWNI

SEQ ID NO: 3507 - protein, 40 aa, Artificial Sequence
  Description of Artificial Sequence: Synthetic polypeptide
EPGQALFNGDMEPEAGAGAGAAASSAADPAIPEEVWNIKQ

SEQ ID NO: 3508 - protein, 40 aa, Artificial Sequence
  Description of Artificial Sequence: Synthetic polypeptide
RDQGFRGDGGSTTGLSATPPASLPGSLTNVKALQKSPGPQ

SEQ ID NO: 3509 - protein, 40 aa, Artificial Sequence
  Description of Artificial Sequence: Synthetic polypeptide
MTGQLPYSNINNRDQIIFMVGRGYLSPDLSKVRSNCPKAM

SEQ ID NO: 3510 - protein, 40 aa, Artificial Sequence
  Description of Artificial Sequence: Synthetic polypeptide
QLDSEDLASLKFLSLDYIPQRKQEPIKDALMLFQRLQEKR

SEQ ID NO: 3511 - protein, 40 aa, Artificial Sequence
  Description of Artificial Sequence: Synthetic polypeptide
ASANWTIQYNDPTQESIILKPKMALEVGDYKINLKLMDNQ

SEQ ID NO: 3512 - protein, 40 aa, Artificial Sequence
  Description of Artificial Sequence: Synthetic polypeptide
TFVNTELVGKGKRRPLNNNSEIALSLSRNKVFVFFDLTVD

SEQ ID NO: 3513 - protein, 40 aa, Artificial Sequence
  Description of Artificial Sequence: Synthetic polypeptide
FVNTELVGKGKRRPLNNNSEIALSLSRNKVFVFFDLTVDD

SEQ ID NO: 3514 - protein, 40 aa, Artificial Sequence
  Description of Artificial Sequence: Synthetic polypeptide
TLCGTPTYLAPEVLVSVGTAGYNRAVDCWSLGVILFICLS

SEQ ID NO: 3515 - protein, 40 aa, Artificial Sequence
  Description of Artificial Sequence: Synthetic polypeptide
RDSTLISKQILSDCRAVLVVLGPWCADKVAGMMVRELQKY

SEQ ID NO: 3516 - protein, 40 aa, Artificial Sequence
  Description of Artificial Sequence: Synthetic polypeptide
VIKLLEILRKYKPYERQQFESVEWYNNRNQDNYVSWSDSE

SEQ ID NO: 3517 - protein, 40 aa, Artificial Sequence
  Description of Artificial Sequence: Synthetic polypeptide
PTEYRSYVQSKGRARAPISNYIMLADTDKIKSFEEDLKTY

SEQ ID NO: 3518 - protein, 40 aa, Artificial Sequence
  Description of Artificial Sequence: Synthetic polypeptide
EYRSYVQSKGRARAPISNYIMLADTDKIKSFEEDLKTYKA

SEQ ID NO: 3519 - protein, 40 aa, Artificial Sequence
  Description of Artificial Sequence: Synthetic polypeptide
YRSYVQSKGRARAPISNYIMLADTDKIKSFEEDLKTYKAI

SEQ ID NO: 3520 - protein, 40 aa, Artificial Sequence
  Description of Artificial Sequence: Synthetic polypeptide
YVQSKGRARAPISNYIMLADTDKIKSFEEDLKTYKAIEKI

SEQ ID NO: 3521 - protein, 40 aa, Artificial Sequence
  Description of Artificial Sequence: Synthetic polypeptide
VQSKGRARAPISNYIMLADTDKIKSFEEDLKTYKAIEKIL

SEQ ID NO: 3522 - protein, 40 aa, Artificial Sequence
  Description of Artificial Sequence: Synthetic polypeptide
GRARAPISNYIMLADTDKIKSFEEDLKTYKAIEKILRNKC

SEQ ID NO: 3523 - protein, 40 aa, Artificial Sequence
  Description of Artificial Sequence: Synthetic polypeptide
RARAPISNYIMLADTDKIKSFEEDLKTYKAIEKILRNKCS

SEQ ID NO: 3524 - protein, 40 aa, Artificial Sequence
  Description of Artificial Sequence: Synthetic polypeptide
ARAPISNYIMLADTDKIKSFEEDLKTYKAIEKILRNKCSK

SEQ ID NO: 3525 - protein, 40 aa, Artificial Sequence
  Description of Artificial Sequence: Synthetic polypeptide
RAPISNYIMLADTDKIKSFEEDLKTYKAIEKILRNKCSKS

SEQ ID NO: 3526 - protein, 40 aa, Artificial Sequence
  Description of Artificial Sequence: Synthetic polypeptide
APISNYIMLADTDKIKSFEEDLKTYKAIEKILRNKCSKSV

SEQ ID NO: 3527 - protein, 40 aa, Artificial Sequence
  Description of Artificial Sequence: Synthetic polypeptide
PISNYIMLADTDKIKSFEEDLKTYKAIEKILRNKCSKSVD

SEQ ID NO: 3528 - protein, 40 aa, Artificial Sequence
  Description of Artificial Sequence: Synthetic polypeptide
ISNYIMLADTDKIKSFEEDLKTYKAIEKILRNKCSKSVDT

SEQ ID NO: 3529 - protein, 40 aa, Artificial Sequence
  Description of Artificial Sequence: Synthetic polypeptide
SNYIMLADTDKIKSFEEDLKTYKAIEKILRNKCSKSVDTG

SEQ ID NO: 3530 - protein, 40 aa, Artificial Sequence
  Description of Artificial Sequence: Synthetic polypeptide
NYIMLADTDKIKSFEEDLKTYKAIEKILRNKCSKSVDTGE

SEQ ID NO: 3531 - protein, 40 aa, Artificial Sequence
  Description of Artificial Sequence: Synthetic polypeptide
YIMLADTDKIKSFEEDLKTYKAIEKILRNKCSKSVDTGET

SEQ ID NO: 3532 - protein, 40 aa, Artificial Sequence
  Description of Artificial Sequence: Synthetic polypeptide
EEADYEDDFLEYDQEHIRFIDNMLMGSGAFVKKISLSPFS

SEQ ID NO: 3533 - protein, 40 aa, Artificial Sequence
  Description of Artificial Sequence: Synthetic polypeptide
ADSYEMEEDGVRKCKKCEGPCRKVCNGIGIGEFKDSLSIN

SEQ ID NO: 3534 - protein, 40 aa, Artificial Sequence
  Description of Artificial Sequence: Synthetic polypeptide
KEISDGDVIISGNKNLCYANTINWKKLFGTSGQKTKIISN

SEQ ID NO: 3535 - protein, 40 aa, Artificial Sequence
  Description of Artificial Sequence: Synthetic polypeptide
EISDGDVIISGNKNLCYANTINWKKLFGTSGQKTKIISNR

SEQ ID NO: 3536 - protein, 40 aa, Artificial Sequence
  Description of Artificial Sequence: Synthetic polypeptide
VLGSGAFGTVYKGLWIPEGEKVKIPVAIKELREATSPKAN

SEQ ID NO: 3537 - protein, 40 aa, Artificial Sequence
  Description of Artificial Sequence: Synthetic polypeptide
ALAVLDNGDPLNNTTPVTGASPGGLRELQLRSLTEILKGG

SEQ ID NO: 3538 - protein, 40 aa, Artificial Sequence
  Description of Artificial Sequence: Synthetic polypeptide
LDNGDPLNNTTPVTGASPGGLRELQLRSLTEILKGGVLIQ

SEQ ID NO: 3539 - protein, 40 aa, Artificial Sequence
  Description of Artificial Sequence: Synthetic polypeptide
GDYAAMGACPASEQGYEEMRAFQGPGHQAPHVHYARLKTL

SEQ ID NO: 3540 - protein, 40 aa, Artificial Sequence
  Description of Artificial Sequence: Synthetic polypeptide
DYAAMGACPASEQGYEEMRAFQGPGHQAPHVHYARLKTLR

SEQ ID NO: 3541 - protein, 40 aa, Artificial Sequence
  Description of Artificial Sequence: Synthetic polypeptide
AMGACPASEQGYEEMRAFQGPGHQAPHVHYARLKTLRSLE

SEQ ID NO: 3542 - protein, 40 aa, Artificial Sequence
  Description of Artificial Sequence: Synthetic polypeptide
MGACPASEQGYEEMRAFQGPGHQAPHVHYARLKTLRSLEA

SEQ ID NO: 3543 - protein, 40 aa, Artificial Sequence
  Description of Artificial Sequence: Synthetic polypeptide
ASEQGYEEMRAFQGPGHQAPHVHYARLKTLRSLEATDSAF

SEQ ID NO: 3544 - protein, 40 aa, Artificial Sequence
  Description of Artificial Sequence: Synthetic polypeptide
YEEMRAFQGPGHQAPHVHYARLKTLRSLEATDSAFDNPDY

SEQ ID NO: 3545 - protein, 40 aa, Artificial Sequence
  Description of Artificial Sequence: Synthetic polypeptide
RYALAIFLNYRKDGNFGLQELGLKNLTEILNGGVYVDQNK

SEQ ID NO: 3546 - protein, 40 aa, Artificial Sequence
  Description of Artificial Sequence: Synthetic polypeptide
ALAIFLNYRKDGNFGLQELGLKNLTEILNGGVYVDQNKFL

SEQ ID NO: 3547 - protein, 40 aa, Artificial Sequence
  Description of Artificial Sequence: Synthetic polypeptide
MAIFLNYRKDGNFGLQELGLKNLTEILNGGVYVDQNKFLC

SEQ ID NO: 3548 - protein, 40 aa, Artificial Sequence
  Description of Artificial Sequence: Synthetic polypeptide
GCLLEYVHEHKDNIGSQLLLNWCVQIAKGMMYLEERRLVH

SEQ ID NO: 3549 - protein, 40 aa, Artificial Sequence
  Description of Artificial Sequence: Synthetic polypeptide
PETETCLHTLQGHTNRVYSLQFDGIHVVSGSLDTSIRVWD

SEQ ID NO: 3550 - protein, 40 aa, Artificial Sequence
  Description of Artificial Sequence: Synthetic polypeptide
NRGVVSMVILKMTETQAGEYLLFIQSEATNYTILFTVSIR

SEQ ID NO: 3551 - protein, 40 aa, Artificial Sequence
  Description of Artificial Sequence: Synthetic polypeptide
GEYLLFIQSEATNYTILFTVSIRNTLLYTLRRPYFRKMEN

SEQ ID NO: 3552 - protein, 40 aa, Artificial Sequence
  Description of Artificial Sequence: Synthetic polypeptide
EYLLFIQSEATNYTILFTVSIRNTLLYTLRRPYFRKMENQ

SEQ ID NO: 3553 - protein, 40 aa, Artificial Sequence
  Description of Artificial Sequence: Synthetic polypeptide
YLLFIQSEATNYTILFTVSIRNTLLYTLRRPYFRKMENQD

SEQ ID NO: 3554 - protein, 40 aa, Artificial Sequence
  Description of Artificial Sequence: Synthetic polypeptide
LLFIQSEATNYTILFTVSIRNTLLYTLRRPYFRKMENQDA

SEQ ID NO: 3555 - protein, 40 aa, Artificial Sequence
  Description of Artificial Sequence: Synthetic polypeptide
FIQSEATNYTILFTVSIRNTLLYTLRRPYFRKMENQDALV

SEQ ID NO: 3556 - protein, 40 aa, Artificial Sequence
  Description of Artificial Sequence: Synthetic polypeptide
IQSEATNYTILFTVSIRNTLLYTLRRPYFRKMENQDALVC

SEQ ID NO: 3557 - protein, 40 aa, Artificial Sequence
  Description of Artificial Sequence: Synthetic polypeptide
QSEATNYTILFTVSIRNTLLYTLRRPYFRKMENQDALVCI

SEQ ID NO: 3558 - protein, 40 aa, Artificial Sequence
  Description of Artificial Sequence: Synthetic polypeptide
SEATNYTILFTVSIRNTLLYTLRRPYFRKMENQDALVCIS

SEQ ID NO: 3559 - protein, 40 aa, Artificial Sequence
  Description of Artificial Sequence: Synthetic polypeptide
EATNYTILFTVSIRNTLLYTLRRPYFRKMENQDALVCISE

SEQ ID NO: 3560 - protein, 40 aa, Artificial Sequence
  Description of Artificial Sequence: Synthetic polypeptide
ATNYTILFTVSIRNTLLYTLRRPYFRKMENQDALVCISES

SEQ ID NO: 3561 - protein, 40 aa, Artificial Sequence
  Description of Artificial Sequence: Synthetic polypeptide
TNYTILFTVSIRNTLLYTLRRPYFRKMENQDALVCISESV

SEQ ID NO: 3562 - protein, 40 aa, Artificial Sequence
  Description of Artificial Sequence: Synthetic polypeptide
NYTILFTVSIRNTLLYTLRRPYFRKMENQDALVCISESVP

SEQ ID NO: 3563 - protein, 40 aa, Artificial Sequence
  Description of Artificial Sequence: Synthetic polypeptide
YTILFTVSIRNTLLYTLRRPYFRKMENQDALVCISESVPE

SEQ ID NO: 3564 - protein, 40 aa, Artificial Sequence
  Description of Artificial Sequence: Synthetic polypeptide
TILFTVSIRNTLLYTLRRPYFRKMENQDALVCISESVPEP

SEQ ID NO: 3565 - protein, 40 aa, Artificial Sequence
  Description of Artificial Sequence: Synthetic polypeptide
ILFTVSIRNTLLYTLRRPYFRKMENQDALVCISESVPEPI

SEQ ID NO: 3566 - protein, 40 aa, Artificial Sequence
  Description of Artificial Sequence: Synthetic polypeptide
MFTVSIRNTLLYTLRRPYFRKMENQDALVCISESVPEPIV

SEQ ID NO: 3567 - protein, 40 aa, Artificial Sequence
  Description of Artificial Sequence: Synthetic polypeptide
FTVSIRNTLLYTLRRPYFRKMENQDALVCISESVPEPIVE

SEQ ID NO: 3568 - protein, 40 aa, Artificial Sequence
  Description of Artificial Sequence: Synthetic polypeptide
TVSIRNTLLYTLRRPYFRKMENQDALVCISESVPEPIVEW

SEQ ID NO: 3569 - protein, 40 aa, Artificial Sequence
  Description of Artificial Sequence: Synthetic polypeptide
VSIRNTLLYTLRRPYFRKMENQDALVCISESVPEPIVEWV

SEQ ID NO: 3570 - protein, 40 aa, Artificial Sequence
  Description of Artificial Sequence: Synthetic polypeptide
SIRNTLLYTLRRPYFRKMENQDALVCISESVPEPIVEWVL

SEQ ID NO: 3571 - protein, 40 aa, Artificial Sequence
  Description of Artificial Sequence: Synthetic polypeptide
IRNTLLYTLRRPYFRKMENQDALVCISESVPEPIVEWVLC

SEQ ID NO: 3572 - protein, 40 aa, Artificial Sequence
  Description of Artificial Sequence: Synthetic polypeptide
NTLLYTLRRPYFRKMENQDALVCISESVPEPIVEWVLCDS

SEQ ID NO: 3573 - protein, 40 aa, Artificial Sequence
  Description of Artificial Sequence: Synthetic polypeptide
MRGARGAWDFLCVLLLLLRVQTGSSQPSVSPGEPSPPSIH

SEQ ID NO: 3574 - protein, 40 aa, Artificial Sequence
  Description of Artificial Sequence: Synthetic polypeptide
EHQQWIYMNRTFTDKWEDYPKSENESNIRYVSELHLTRLK

SEQ ID NO: 3575 - protein, 40 aa, Artificial Sequence
  Description of Artificial Sequence: Synthetic polypeptide
MRTGEGFLCVFAINNTKSFEDIHHYREQIKRVKDSEDVPM

SEQ ID NO: 3576 - protein, 40 aa, Artificial Sequence
  Description of Artificial Sequence: Synthetic polypeptide
TGEGFLCVFAINNTKSFEDIHHYREQIKRVKDSEDVPMVL

SEQ ID NO: 3577 - protein, 40 aa, Artificial Sequence
  Description of Artificial Sequence: Synthetic polypeptide
GEGFLCVFAINNTKSFEDIHHYREQIKRVKDSEDVPMVLV

SEQ ID NO: 3578 - protein, 40 aa, Artificial Sequence
  Description of Artificial Sequence: Synthetic polypeptide
EGFLCVFAINNTKSFEDIHHYREQIKRVKDSEDVPMVLVG

SEQ ID NO: 3579 - protein, 40 aa, Artificial Sequence
  Description of Artificial Sequence: Synthetic polypeptide
INNTKSFEDIHHYREQIKRVKDSEDVPMVLVGNKCDLPSR

SEQ ID NO: 3580 - protein, 40 aa, Artificial Sequence
  Description of Artificial Sequence: Synthetic polypeptide
QDFVNKCLIKNPAERADLKQLMVHAFIKRSDAEEVDFAGW

SEQ ID NO: 3581 - protein, 40 aa, Artificial Sequence
  Description of Artificial Sequence: Synthetic polypeptide
IPASEQETLVRPKPLLLKLLKSVGAQKDTYTMKEVLFYLG

SEQ ID NO: 3582 - protein, 40 aa, Artificial Sequence
  Description of Artificial Sequence: Synthetic polypeptide
QETLVRPKPLLLKLLKSVGAQKDTYTMKEVLFYLGQYIMT

SEQ ID NO: 3583 - protein, 40 aa, Artificial Sequence
  Description of Artificial Sequence: Synthetic polypeptide
PKPLLLKLLKSVGAQKDTYTMKEVLFYLGQYIMTKRLYDE

SEQ ID NO: 3584 - protein, 40 aa, Artificial Sequence
  Description of Artificial Sequence: Synthetic polypeptide
SVGAQKDTYTMKEVLFYLGQYIMTKRLYDEKQQHIVYCSN

SEQ ID NO: 3585 - protein, 40 aa, Artificial Sequence
  Description of Artificial Sequence: Synthetic polypeptide
AQKDTYTMKEVLFYLGQYIMTKRLYDEKQQHIVYCSNDLL

SEQ ID NO: 3586 - protein, 40 aa, Artificial Sequence
  Description of Artificial Sequence: Synthetic polypeptide
TYTMKEVLFYLGQYIMTKRLYDEKQQHIVYCSNDLLGDLF

SEQ ID NO: 3587 - protein, 40 aa, Artificial Sequence
  Description of Artificial Sequence: Synthetic polypeptide
YTMKEVLFYLGQYIMTKRLYDEKQQHIVYCSNDLLGDLFG

SEQ ID NO: 3588 - protein, 40 aa, Artificial Sequence
  Description of Artificial Sequence: Synthetic polypeptide
MFGVPSFSVKEHRKIYTMIYRNLVVVNQQESSDSGTSVSE

SEQ ID NO: 3589 - protein, 40 aa, Artificial Sequence
  Description of Artificial Sequence: Synthetic polypeptide
LGVGIKVEAADTEQTSEEVGKVSDKKVIEVGKNDDLEDSK

SEQ ID NO: 3590 - protein, 40 aa, Artificial Sequence
  Description of Artificial Sequence: Synthetic polypeptide
GIKVEAADTEQTSEEVGKVSDKKVIEVGKNDDLEDSKSLS

SEQ ID NO: 3591 - protein, 40 aa, Artificial Sequence
  Description of Artificial Sequence: Synthetic polypeptide
IKVEAADTEQTSEEVGKVSDKKVIEVGKNDDLEDSKSLSD

SEQ ID NO: 3592 - protein, 40 aa, Artificial Sequence
  Description of Artificial Sequence: Synthetic polypeptide
KVEAADTEQTSEEVGKVSDKKVIEVGKNDDLEDSKSLSDD

SEQ ID NO: 3593 - protein, 40 aa, Artificial Sequence
  Description of Artificial Sequence: Synthetic polypeptide
ADTEQTSEEVGKVSDKKVIEVGKNDDLEDSKSLSDDTDVE

SEQ ID NO: 3594 - protein, 40 aa, Artificial Sequence
  Description of Artificial Sequence: Synthetic polypeptide
EQTSEEVGKVSDKKVIEVGKNDDLEDSKSLSDDTDVEVTS

SEQ ID NO: 3595 - protein, 40 aa, Artificial Sequence
  Description of Artificial Sequence: Synthetic polypeptide
EKENEGNDVPDCRRTISAPVVRPKDAYIKKENSKLFDPCN

SEQ ID NO: 3596 - protein, 40 aa, Artificial Sequence
  Description of Artificial Sequence: Synthetic polypeptide
KYFDLIYVHNPVFKPFEKPVMISMGNENVLEIKGNDIDPE

SEQ ID NO: 3597 - protein, 40 aa, Artificial Sequence
  Description of Artificial Sequence: Synthetic polypeptide
MISMGNENVLEIKGNDIDPEAVKGEVLKVGNKSCENIHLH

SEQ ID NO: 3598 - protein, 40 aa, Artificial Sequence
  Description of Artificial Sequence: Synthetic polypeptide
GNENVLEIKGNDIDPEAVKGEVLKVGNKSCENIHLHSEAV

SEQ ID NO: 3599 - protein, 40 aa, Artificial Sequence
  Description of Artificial Sequence: Synthetic polypeptide
QAVQHVVIGPSSLIVHFNEVIGRGHFGCVYHGTLLDNDGK

SEQ ID NO: 3600 - protein, 40 aa, Artificial Sequence
  Description of Artificial Sequence: Synthetic polypeptide
IFSTFIGEHYVHVNATYVNVKCVAPYPSLLSSEDNADDEV

SEQ ID NO: 3601 - protein, 40 aa, Artificial Sequence
  Description of Artificial Sequence: Synthetic polypeptide
ILKALILKLKDPDPDPNPGVINNVLATIGELAQVSGLEMR

SEQ ID NO: 3602 - protein, 40 aa, Artificial Sequence
  Description of Artificial Sequence: Synthetic polypeptide
PFPVNKREPAPVPAAPASAPAAGPAVASGAGIAAPAGAPG

SEQ ID NO: 3603 - protein, 40 aa, Artificial Sequence
  Description of Artificial Sequence: Synthetic polypeptide
SGKVVNIDTNSLRSSMRPGFEDIIRRCIQRFFSLNDGQSW

SEQ ID NO: 3604 - protein, 40 aa, Artificial Sequence
  Description of Artificial Sequence: Synthetic polypeptide
DIDLGVSREVFDFSQRRKEYELEKQKKLEKERQEQLQKEQ

SEQ ID NO: 3605 - protein, 40 aa, Artificial Sequence
  Description of Artificial Sequence: Synthetic polypeptide
IDLGVSREVFDFSQRRKEYELEKQKKLEKERQEQLQKEQE

SEQ ID NO: 3606 - protein, 40 aa, Artificial Sequence
  Description of Artificial Sequence: Synthetic polypeptide
LGVSREVFDFSQRRKEYELEKQKKLEKERQEQLQKEQEKA

SEQ ID NO: 3607 - protein, 40 aa, Artificial Sequence
  Description of Artificial Sequence: Synthetic polypeptide
GVSREVFDFSQRRKEYELEKQKKLEKERQEQLQKEQEKAF

SEQ ID NO: 3608 - protein, 40 aa, Artificial Sequence
  Description of Artificial Sequence: Synthetic polypeptide
VSREVFDFSQRRKEYELEKQKKLEKERQEQLQKEQEKAFF

SEQ ID NO: 3609 - protein, 40 aa, Artificial Sequence
  Description of Artificial Sequence: Synthetic polypeptide
EVFDFSQRRKEYELEKQKKLEKERQEQLQKEQEKAFFAQL

SEQ ID NO: 3610 - protein, 40 aa, Artificial Sequence
  Description of Artificial Sequence: Synthetic polypeptide
QRRKEYELEKQKKLEKERQEQLQKEQEKAFFAQLQLDEET

SEQ ID NO: 3611 - protein, 40 aa, Artificial Sequence
  Description of Artificial Sequence: Synthetic polypeptide
RRKEYELEKQKKLEKERQEQLQKEQEKAFFAQLQLDEETG

SEQ ID NO: 3612 - protein, 40 aa, Artificial Sequence
  Description of Artificial Sequence: Synthetic polypeptide
RKEYELEKQKKLEKERQEQLQKEQEKAFFAQLQLDEETGE

SEQ ID NO: 3613 - protein, 40 aa, Artificial Sequence
  Description of Artificial Sequence: Synthetic polypeptide
KEYELEKQKKLEKERQEQLQKEQEKAFFAQLQLDEETGEF

SEQ ID NO: 3614 - protein, 40 aa, Artificial Sequence
  Description of Artificial Sequence: Synthetic polypeptide
EYELEKQKKLEKERQEQLQKEQEKAFFAQLQLDEETGEFL

SEQ ID NO: 3615 - protein, 40 aa, Artificial Sequence
  Description of Artificial Sequence: Synthetic polypeptide
YELEKQKKLEKERQEQLQKEQEKAFFAQLQLDEETGEFLP

SEQ ID NO: 3616 - protein, 40 aa, Artificial Sequence
  Description of Artificial Sequence: Synthetic polypeptide
KLVETTMVPSPEAKLTEVDNYHFYSSIPSMEKEVGNCSPH

SEQ ID NO: 3617 - protein, 40 aa, Artificial Sequence
  Description of Artificial Sequence: Synthetic polypeptide
VETTMVPSPEAKLTEVDNYHFYSSIPSMEKEVGNCSPHFL

SEQ ID NO: 3618 - protein, 40 aa, Artificial Sequence
  Description of Artificial Sequence: Synthetic polypeptide
NCRKRKLENIVELEQDLDHLKDEKEKLLKEKGENDKSLHL

SEQ ID NO: 3619 - protein, 40 aa, Artificial Sequence
  Description of Artificial Sequence: Synthetic polypeptide
NIVELEQDLDHLKDEKEKLLKEKGENDKSLHLLKKQLSTL

SEQ ID NO: 3620 - protein, 40 aa, Artificial Sequence
  Description of Artificial Sequence: Synthetic polypeptide
VELEQDLDHLKDEKEKLLKEKGENDKSLHLLKKQLSTLYL

SEQ ID NO: 3621 - protein, 40 aa, Artificial Sequence
  Description of Artificial Sequence: Synthetic polypeptide
ELEQDLDHLKDEKEKLLKEKGENDKSLHLLKKQLSTLYLE

SEQ ID NO: 3622 - protein, 40 aa, Artificial Sequence
  Description of Artificial Sequence: Synthetic polypeptide
EQDLDHLKDEKEKLLKEKGENDKSLHLLKKQLSTLYLEVF

SEQ ID NO: 3623 - protein, 40 aa, Artificial Sequence
  Description of Artificial Sequence: Synthetic polypeptide
QDLDHLKDEKEKLLKEKGENDKSLHLLKKQLSTLYLEVFS

SEQ ID NO: 3624 - protein, 40 aa, Artificial Sequence
  Description of Artificial Sequence: Synthetic polypeptide
DLDHLKDEKEKLLKEKGENDKSLHLLKKQLSTLYLEVFSM

SEQ ID NO: 3625 - protein, 40 aa, Artificial Sequence
  Description of Artificial Sequence: Synthetic polypeptide
LDHLKDEKEKLLKEKGENDKSLHLLKKQLSTLYLEVFSML

SEQ ID NO: 3626 - protein, 40 aa, Artificial Sequence
  Description of Artificial Sequence: Synthetic polypeptide
DHLKDEKEKLLKEKGENDKSLHLLKKQLSTLYLEVFSMLR

SEQ ID NO: 3627 - protein, 40 aa, Artificial Sequence
  Description of Artificial Sequence: Synthetic polypeptide
HLKDEKEKLLKEKGENDKSLHLLKKQLSTLYLEVFSMLRD

SEQ ID NO: 3628 - protein, 40 aa, Artificial Sequence
  Description of Artificial Sequence: Synthetic polypeptide
MKDEKEKLLKEKGENDKSLHLLKKQLSTLYLEVFSMLRDE

SEQ ID NO: 3629 - protein, 40 aa, Artificial Sequence
  Description of Artificial Sequence: Synthetic polypeptide
KDEKEKLLKEKGENDKSLHLLKKQLSTLYLEVFSMLRDED

SEQ ID NO: 3630 - protein, 40 aa, Artificial Sequence
  Description of Artificial Sequence: Synthetic polypeptide
DEKEKLLKEKGENDKSLHLLKKQLSTLYLEVFSMLRDEDG

SEQ ID NO: 3631 - protein, 40 aa, Artificial Sequence
  Description of Artificial Sequence: Synthetic polypeptide
EKEKLLKEKGENDKSLHLLKKQLSTLYLEVFSMLRDEDGK

SEQ ID NO: 3632 - protein, 40 aa, Artificial Sequence
  Description of Artificial Sequence: Synthetic polypeptide
KEKLLKEKGENDKSLHLLKKQLSTLYLEVFSMLRDEDGKP

SEQ ID NO: 3633 - protein, 40 aa, Artificial Sequence
  Description of Artificial Sequence: Synthetic polypeptide
EKLLKEKGENDKSLHLLKKQLSTLYLEVFSMLRDEDGKPY

SEQ ID NO: 3634 - protein, 40 aa, Artificial Sequence
  Description of Artificial Sequence: Synthetic polypeptide
KLLKEKGENDKSLHLLKKQLSTLYLEVFSMLRDEDGKPYS

SEQ ID NO: 3635 - protein, 40 aa, Artificial Sequence
  Description of Artificial Sequence: Synthetic polypeptide
ATLITIKHELFKEARKYPLHQLLQDESSYIFVSVTQEAER

SEQ ID NO: 3636 - protein, 40 aa, Artificial Sequence
  Description of Artificial Sequence: Synthetic polypeptide
TLITIKHELFKEARKYPLHQLLQDESSYIFVSVTQEAERE

SEQ ID NO: 3637 - protein, 40 aa, Artificial Sequence
  Description of Artificial Sequence: Synthetic polypeptide
LHQLLQDESSYIFVSVTQEAEREEFFDETRRLCDLRLFQP

SEQ ID NO: 3638 - protein, 40 aa, Artificial Sequence
  Description of Artificial Sequence: Synthetic polypeptide
SRAMYVYPPNVESSPELPKHIYNKLDKGQIIVVIWVIVSP

SEQ ID NO: 3639 - protein, 40 aa, Artificial Sequence
  Description of Artificial Sequence: Synthetic polypeptide
RAMYVYPPNVESSPELPKHIYNKLDKGQIIVVIWVIVSPN

SEQ ID NO: 3640 - protein, 40 aa, Artificial Sequence
  Description of Artificial Sequence: Synthetic polypeptide
YVYPPNVESSPELPKHIYNKLDKGQIIVVIWVIVSPNNDK

SEQ ID NO: 3641 - protein, 40 aa, Artificial Sequence
  Description of Artificial Sequence: Synthetic polypeptide
NVESSPELPKHIYNKLDKGQIIVVIWVIVSPNNDKQKYTL

SEQ ID NO: 3642 - protein, 40 aa, Artificial Sequence
  Description of Artificial Sequence: Synthetic polypeptide
EAIRKKTRSMLLSSEQLKLCVLEYQGKYILKVCGCDEYFL

SEQ ID NO: 3643 - protein, 40 aa, Artificial Sequence
  Description of Artificial Sequence: Synthetic polypeptide
KKTRSMLLSSEQLKLCVLEYQGKYILKVCGCDEYFLEKYP

SEQ ID NO: 3644 - protein, 40 aa, Artificial Sequence
  Description of Artificial Sequence: Synthetic polypeptide
QLKLCVLEYQGKYILKVCGCDEYFLEKYPLSQYKYIRSCI

SEQ ID NO: 3645 - protein, 40 aa, Artificial Sequence
  Description of Artificial Sequence: Synthetic polypeptide
NIRDIDKIYVRTGIYHGGEPLCDNVNTQRVPCSNPRWNEW

SEQ ID NO: 3646 - protein, 40 aa, Artificial Sequence
  Description of Artificial Sequence: Synthetic polypeptide
MDCNYPDPMVRGFAVRCLEKYLTDDKLSQYLIQLVQVLKY

SEQ ID NO: 3647 - protein, 40 aa, Artificial Sequence
  Description of Artificial Sequence: Synthetic polypeptide
PMVRGFAVRCLEKYLTDDKLSQYLIQLVQVLKYEQYLDNL

SEQ ID NO: 3648 - protein, 40 aa, Artificial Sequence
  Description of Artificial Sequence: Synthetic polypeptide
EMHNKTVSQRFGLLLESYCRACGMYLKHLNRQVEAMEKLI

SEQ ID NO: 3649 - protein, 40 aa, Artificial Sequence
  Description of Artificial Sequence: Synthetic polypeptide
RIMENIWQNQGLDLRMLPYGCLSIGDCVGLIEVVRNSHTI

SEQ ID NO: 3650 - protein, 40 aa, Artificial Sequence
  Description of Artificial Sequence: Synthetic polypeptide
FERFQEMCYKAYLAIRQHANLFINLFSMMLGSGMPELQSF

SEQ ID NO: 3651 - protein, 40 aa, Artificial Sequence
  Description of Artificial Sequence: Synthetic polypeptide
YPVSKYQQDQVVKEDNIEAVGKKLHEYNTQFQEKSREYDR

SEQ ID NO: 3652 - protein, 40 aa, Artificial Sequence
  Description of Artificial Sequence: Synthetic polypeptide
SKYQQDQVVKEDNIEAVGKKLHEYNTQFQEKSREYDRLYE

SEQ ID NO: 3653 - protein, 40 aa, Artificial Sequence
  Description of Artificial Sequence: Synthetic polypeptide
IEAVGKKLHEYNTQFQEKSREYDRLYEEYTRTSQEIQMKR

SEQ ID NO: 3654 - protein, 40 aa, Artificial Sequence
  Description of Artificial Sequence: Synthetic polypeptide
FNETIKIFEEQCQTQERYSKEYIEKFKREGNEKEIQRIMH

SEQ ID NO: 3655 - protein, 40 aa, Artificial Sequence
  Description of Artificial Sequence: Synthetic polypeptide
NLLRGKRDGTFLVRESSKQGCYACSVVVDGEVKHCVINKT

SEQ ID NO: 3656 - protein, 40 aa, Artificial Sequence
  Description of Artificial Sequence: Synthetic polypeptide
EACVNIAQLLPQEDLEALVMPTLRQAAEDKSWRVRYMVAD

SEQ ID NO: 3657 - protein, 40 aa, Artificial Sequence
  Description of Artificial Sequence: Synthetic polypeptide
GMVQTEAQYRFIYMAVQHYIETLQRRIEEEQKSKRKGHEY

SEQ ID NO: 3658 - protein, 40 aa, Artificial Sequence
  Description of Artificial Sequence: Synthetic polypeptide
EDYDRLRPLSYPQTVGETYGKDITSRGKDKPIADVFLICF

SEQ ID NO: 3659 - protein, 40 aa, Artificial Sequence
  Description of Artificial Sequence: Synthetic polypeptide
DRLRPLSYPQTVGETYGKDITSRGKDKPIADVFLICFSLV

SEQ ID NO: 3660 - protein, 40 aa, Artificial Sequence
  Description of Artificial Sequence: Synthetic polypeptide
LRPLSYPQTVGETYGKDITSRGKDKPIADVFLICFSLVSP

SEQ ID NO: 3661 - protein, 40 aa, Artificial Sequence
  Description of Artificial Sequence: Synthetic polypeptide
YPQTVGETYGKDITSRGKDKPIADVFLICFSLVSPASFEN

SEQ ID NO: 3662 - protein, 40 aa, Artificial Sequence
  Description of Artificial Sequence: Synthetic polypeptide
GSYLIRESDRRPGSFVLSFLSQMNVVNHFRIIAMCGDYYI

SEQ ID NO: 3663 - protein, 40 aa, Artificial Sequence
  Description of Artificial Sequence: Synthetic polypeptide
SYLIRESDRRPGSFVLSFLSQMNVVNHFRIIAMCGDYYIG

SEQ ID NO: 3664 - protein, 40 aa, Artificial Sequence
  Description of Artificial Sequence: Synthetic polypeptide
IVVQHFSEEHYIFYFAGETPEQAEDWMKGLQAFCNLRKSS

SEQ ID NO: 3665 - protein, 40 aa, Artificial Sequence
  Description of Artificial Sequence: Synthetic polypeptide
VVQHFSEEHYIFYFAGETPEQAEDWMKGLQAFCNLRKSSP

SEQ ID NO: 3666 - protein, 40 aa, Artificial Sequence
  Description of Artificial Sequence: Synthetic polypeptide
SEEFVFDDLPPDINRFEITLSNKTKKSKDPDILFMRCQLS

SEQ ID NO: 3667 - protein, 40 aa, Artificial Sequence
  Description of Artificial Sequence: Synthetic polypeptide
EEFVFDDLPPDINRFEITLSNKTKKSKDPDILFMRCQLSR

SEQ ID NO: 3668 - protein, 40 aa, Artificial Sequence
  Description of Artificial Sequence: Synthetic polypeptide
EFVFDDLPPDINRFEITLSNKTKKSKDPDILFMRCQLSRL

SEQ ID NO: 3669 - protein, 40 aa, Artificial Sequence
  Description of Artificial Sequence: Synthetic polypeptide
FVFDDLPPDINRFEITLSNKTKKSKDPDILFMRCQLSRLQ

SEQ ID NO: 3670 - protein, 40 aa, Artificial Sequence
  Description of Artificial Sequence: Synthetic polypeptide
VFDDLPPDINRFEITLSNKTKKSKDPDILFMRCQLSRLQK

SEQ ID NO: 3671 - protein, 40 aa, Artificial Sequence
  Description of Artificial Sequence: Synthetic polypeptide
FDDLPPDINRFEITLSNKTKKSKDPDILFMRCQLSRLQKG

SEQ ID NO: 3672 - protein, 40 aa, Artificial Sequence
  Description of Artificial Sequence: Synthetic polypeptide
ICVAHSDELRTLSNERGAQQHVLKKLLAITELLQQKQNQY

SEQ ID NO: 3673 - protein, 40 aa, Artificial Sequence
  Description of Artificial Sequence: Synthetic polypeptide
VAHSDELRTLSNERGAQQHVLKKLLAITELLQQKQNQYTK

SEQ ID NO: 3674 - protein, 40 aa, Artificial Sequence
  Description of Artificial Sequence: Synthetic polypeptide
AHSDELRTLSNERGAQQHVLKKLLAITELLQQKQNQYTKT

SEQ ID NO: 3675 - protein, 40 aa, Artificial Sequence
  Description of Artificial Sequence: Synthetic polypeptide
MGGYIQKKKELWGICIFIAAVDLDEMSFTFTELQKNIEIS

SEQ ID NO: 3676 - protein, 40 aa, Artificial Sequence
  Description of Artificial Sequence: Synthetic polypeptide
SKLERTCELIYLTQPSSSISTEINSALVLKVSWITFLLAK

SEQ ID NO: 3677 - protein, 40 aa, Artificial Sequence
  Description of Artificial Sequence: Synthetic polypeptide
KLERTCELIYLTQPSSSISTEINSALVLKVSWITFLLAKG

SEQ ID NO: 3678 - protein, 40 aa, Artificial Sequence
  Description of Artificial Sequence: Synthetic polypeptide
MERTCELIYLTQPSSSISTEINSALVLKVSWITFLLAKGE

SEQ ID NO: 3679 - protein, 40 aa, Artificial Sequence
  Description of Artificial Sequence: Synthetic polypeptide
TCELIYLTQPSSSISTEINSALVLKVSWITFLLAKGEVLQ

SEQ ID NO: 3680 - protein, 40 aa, Artificial Sequence
  Description of Artificial Sequence: Synthetic polypeptide
TQPSSSISTEINSALVLKVSWITFLLAKGEVLQMEDDLVI

SEQ ID NO: 3681 - protein, 40 aa, Artificial Sequence
  Description of Artificial Sequence: Synthetic polypeptide
EINSALVLKVSWITFLLAKGEVLQMEDDLVISFQLMLCVL

SEQ ID NO: 3682 - protein, 40 aa, Artificial Sequence
  Description of Artificial Sequence: Synthetic polypeptide
MVLKVSWITFLLAKGEVLQMEDDLVISFQLMLCVLDYFIK

SEQ ID NO: 3683 - protein, 40 aa, Artificial Sequence
  Description of Artificial Sequence: Synthetic polypeptide
VLKVSWITFLLAKGEVLQMEDDLVISFQLMLCVLDYFIKL

SEQ ID NO: 3684 - protein, 40 aa, Artificial Sequence
  Description of Artificial Sequence: Synthetic polypeptide
ARIAKQLENDTRIIEVLCKEHECNIDEVKNVYFKNFIPFM

SEQ ID NO: 3685 - protein, 40 aa, Artificial Sequence
  Description of Artificial Sequence: Synthetic polypeptide
RIAKQLENDTRIIEVLCKEHECNIDEVKNVYFKNFIPFMN

SEQ ID NO: 3686 - protein, 40 aa, Artificial Sequence
  Description of Artificial Sequence: Synthetic polypeptide
AKQLENDTRIIEVLCKEHECNIDEVKNVYFKNFIPFMNSL

SEQ ID NO: 3687 - protein, 40 aa, Artificial Sequence
  Description of Artificial Sequence: Synthetic polypeptide
KQLENDTRIIEVLCKEHECNIDEVKNVYFKNFIPFMNSLG

SEQ ID NO: 3688 - protein, 40 aa, Artificial Sequence
  Description of Artificial Sequence: Synthetic polypeptide
QLENDTRIIEVLCKEHECNIDEVKNVYFKNFIPFMNSLGL

SEQ ID NO: 3689 - protein, 40 aa, Artificial Sequence
  Description of Artificial Sequence: Synthetic polypeptide
NDTRIIEVLCKEHECNIDEVKNVYFKNFIPFMNSLGLVTS

SEQ ID NO: 3690 - protein, 40 aa, Artificial Sequence
  Description of Artificial Sequence: Synthetic polypeptide
RIIEVLCKEHECNIDEVKNVYFKNFIPFMNSLGLVTSNGL

SEQ ID NO: 3691 - protein, 40 aa, Artificial Sequence
  Description of Artificial Sequence: Synthetic polypeptide
IIEVLCKEHECNIDEVKNVYFKNFIPFMNSLGLVTSNGLP

SEQ ID NO: 3692 - protein, 40 aa, Artificial Sequence
  Description of Artificial Sequence: Synthetic polypeptide
VLCKEHECNIDEVKNVYFKNFIPFMNSLGLVTSNGLPEVE

SEQ ID NO: 3693 - protein, 40 aa, Artificial Sequence
  Description of Artificial Sequence: Synthetic polypeptide
LCKEHECNIDEVKNVYFKNFIPFMNSLGLVTSNGLPEVEN

SEQ ID NO: 3694 - protein, 40 aa, Artificial Sequence
  Description of Artificial Sequence: Synthetic polypeptide
CKEHECNIDEVKNVYFKNFIPFMNSLGLVTSNGLPEVENL

SEQ ID NO: 3695 - protein, 40 aa, Artificial Sequence
  Description of Artificial Sequence: Synthetic polypeptide
KEHECNIDEVKNVYFKNFIPFMNSLGLVTSNGLPEVENLS

SEQ ID NO: 3696 - protein, 40 aa, Artificial Sequence
  Description of Artificial Sequence: Synthetic polypeptide
EHECNIDEVKNVYFKNFIPFMNSLGLVTSNGLPEVENLSK

SEQ ID NO: 3697 - protein, 40 aa, Artificial Sequence
  Description of Artificial Sequence: Synthetic polypeptide
HECNIDEVKNVYFKNFIPFMNSLGLVTSNGLPEVENLSKR

SEQ ID NO: 3698 - protein, 40 aa, Artificial Sequence
  Description of Artificial Sequence: Synthetic polypeptide
ECNIDEVKNVYFKNFIPFMNSLGLVTSNGLPEVENLSKRY

SEQ ID NO: 3699 - protein, 40 aa, Artificial Sequence
  Description of Artificial Sequence: Synthetic polypeptide
NIDEVKNVYFKNFIPFMNSLGLVTSNGLPEVENLSKRYEE

SEQ ID NO: 3700 - protein, 40 aa, Artificial Sequence
  Description of Artificial Sequence: Synthetic polypeptide
IDEVKNVYFKNFIPFMNSLGLVTSNGLPEVENLSKRYEEI

SEQ ID NO: 3701 - protein, 40 aa, Artificial Sequence
  Description of Artificial Sequence: Synthetic polypeptide
DEVKNVYFKNFIPFMNSLGLVTSNGLPEVENLSKRYEEIY

SEQ ID NO: 3702 - protein, 40 aa, Artificial Sequence
  Description of Artificial Sequence: Synthetic polypeptide
EVKNVYFKNFIPFMNSLGLVTSNGLPEVENLSKRYEEIYL

SEQ ID NO: 3703 - protein, 40 aa, Artificial Sequence
  Description of Artificial Sequence: Synthetic polypeptide
SLGLVTSNGLPEVENLSKRYEEIYLKNKDLDARLFLDHDK

SEQ ID NO: 3704 - protein, 40 aa, Artificial Sequence
  Description of Artificial Sequence: Synthetic polypeptide
GLVTSNGLPEVENLSKRYEEIYLKNKDLDARLFLDHDKTL

SEQ ID NO: 3705 - protein, 40 aa, Artificial Sequence
  Description of Artificial Sequence: Synthetic polypeptide
LVTSNGLPEVENLSKRYEEIYLKNKDLDARLFLDHDKTLQ

SEQ ID NO: 3706 - protein, 40 aa, Artificial Sequence
  Description of Artificial Sequence: Synthetic polypeptide
NGLPEVENLSKRYEEIYLKNKDLDARLFLDHDKTLQTDSI

SEQ ID NO: 3707 - protein, 40 aa, Artificial Sequence
  Description of Artificial Sequence: Synthetic polypeptide
ENLSKRYEEIYLKNKDLDARLFLDHDKTLQTDSIDSFETQ

SEQ ID NO: 3708 - protein, 40 aa, Artificial Sequence
  Description of Artificial Sequence: Synthetic polypeptide
YEEIYLKNKDLDARLFLDHDKTLQTDSIDSFETQRTPRKS

SEQ ID NO: 3709 - protein, 40 aa, Artificial Sequence
  Description of Artificial Sequence: Synthetic polypeptide
EEIYLKNKDLDARLFLDHDKTLQTDSIDSFETQRTPRKSN

SEQ ID NO: 3710 - protein, 40 aa, Artificial Sequence
  Description of Artificial Sequence: Synthetic polypeptide
EIYLKNKDLDARLFLDHDKTLQTDSIDSFETQRTPRKSNL

SEQ ID NO: 3711 - protein, 40 aa, Artificial Sequence
  Description of Artificial Sequence: Synthetic polypeptide
IYLKNKDLDARLFLDHDKTLQTDSIDSFETQRTPRKSNLD

SEQ ID NO: 3712 - protein, 40 aa, Artificial Sequence
  Description of Artificial Sequence: Synthetic polypeptide
MSLLACALEVVMATYSRSTSQNLDSGTDLSFPWILNVLNL

SEQ ID NO: 3713 - protein, 40 aa, Artificial Sequence
  Description of Artificial Sequence: Synthetic polypeptide
DLSFPWILNVLNLKAFDFYKVIESFIKAEGNLTREMIKHL

SEQ ID NO: 3714 - protein, 40 aa, Artificial Sequence
  Description of Artificial Sequence: Synthetic polypeptide
GFLLVFSVTDRGSFEEIYKFQRQILRVKDRDEFPMILIGN

SEQ ID NO: 3715 - protein, 40 aa, Artificial Sequence
  Description of Artificial Sequence: Synthetic polypeptide
VFSVTDRGSFEEIYKFQRQILRVKDRDEFPMILIGNKADL

SEQ ID NO: 3716 - protein, 40 aa, Artificial Sequence
  Description of Artificial Sequence: Synthetic polypeptide
GSFEEIYKFQRQILRVKDRDEFPMILIGNKADLDHQRQVT

SEQ ID NO: 3717 - protein, 40 aa, Artificial Sequence
  Description of Artificial Sequence: Synthetic polypeptide
SFEEIYKFQRQILRVKDRDEFPMILIGNKADLDHQRQVTQ

SEQ ID NO: 3718 - protein, 40 aa, Artificial Sequence
  Description of Artificial Sequence: Synthetic polypeptide
RVKDRDEFPMILIGNKADLDHQRQVTQEEGQQLARQLKVT

SEQ ID NO: 3719 - protein, 40 aa, Artificial Sequence
  Description of Artificial Sequence: Synthetic polypeptide
KDRDEFPMILIGNKADLDHQRQVTQEEGQQLARQLKVTYM

SEQ ID NO: 3720 - protein, 40 aa, Artificial Sequence
  Description of Artificial Sequence: Synthetic polypeptide
DRDEFPMILIGNKADLDHQRQVTQEEGQQLARQLKVTYME

SEQ ID NO: 3721 - protein, 40 aa, Artificial Sequence
  Description of Artificial Sequence: Synthetic polypeptide
FPMILIGNKADLDHQRQVTQEEGQQLARQLKVTYMEASAK

SEQ ID NO: 3722 - protein, 40 aa, Artificial Sequence
  Description of Artificial Sequence: Synthetic polypeptide
PMILIGNKADLDHQRQVTQEEGQQLARQLKVTYMEASAKI

SEQ ID NO: 3723 - protein, 40 aa, Artificial Sequence
  Description of Artificial Sequence: Synthetic polypeptide
MILIGNKADLDHQRQVTQEEGQQLARQLKVTYMEASAKIR

SEQ ID NO: 3724 - protein, 40 aa, Artificial Sequence
  Description of Artificial Sequence: Synthetic polypeptide
LIGNKADLDHQRQVTQEEGQQLARQLKVTYMEASAKIRMN

SEQ ID NO: 3725 - protein, 40 aa, Artificial Sequence
  Description of Artificial Sequence: Synthetic polypeptide
IGNKADLDHQRQVTQEEGQQLARQLKVTYMEASAKIRMNV

SEQ ID NO: 3726 - protein, 40 aa, Artificial Sequence
  Description of Artificial Sequence: Synthetic polypeptide
ISALAIAALAEAATPYGIESFDSVLKPLWKGIRQHRGKGL

SEQ ID NO: 3727 - protein, 40 aa, Artificial Sequence
  Description of Artificial Sequence: Synthetic polypeptide
IESFDSVLKPLWKGIRQHRGKGLAAFLKAIGYLIPLMDAE

SEQ ID NO: 3728 - protein, 40 aa, Artificial Sequence
  Description of Artificial Sequence: Synthetic polypeptide
EYANYYTREVMLILIREFQSPDEEMKKIVLKVVKQCCGTD

SEQ ID NO: 3729 - protein, 40 aa, Artificial Sequence
  Description of Artificial Sequence: Synthetic polypeptide
VLPALMNEYRVPELNVQNGVLKSLSFLFEYIGEMGKDYIY

SEQ ID NO: 3730 - protein, 40 aa, Artificial Sequence
  Description of Artificial Sequence: Synthetic polypeptide
NEYRVPELNVQNGVLKSLSFLFEYIGEMGKDYIYAVTPLL

SEQ ID NO: 3731 - protein, 40 aa, Artificial Sequence
  Description of Artificial Sequence: Synthetic polypeptide
MLNYVWPNVFETSPHVIQAVMGALEGLRVAIGPCRMLQYC

SEQ ID NO: 3732 - protein, 40 aa, Artificial Sequence
  Description of Artificial Sequence: Synthetic polypeptide
SILPFTPPVVKRLLGWKKSAGGSGGAGGGEQNGQEEKWCE

SEQ ID NO: 3733 - protein, 40 aa, Artificial Sequence
  Description of Artificial Sequence: Synthetic polypeptide
EYRRQTVTSTPCWIELHLNGPLQWLDKVLTQMGSPSVRCS

SEQ ID NO: 3734 - protein, 40 aa, Artificial Sequence
  Description of Artificial Sequence: Synthetic polypeptide
LKHVKYCQYAFDLKCDSVCVNPYHYERVVSPGIDLSGLTL

SEQ ID NO: 3735 - protein, 40 aa, Artificial Sequence
  Description of Artificial Sequence: Synthetic polypeptide
KHVKYCQYAFDLKCDSVCVNPYHYERVVSPGIDLSGLTLQ

SEQ ID NO: 3736 - protein, 40 aa, Artificial Sequence
  Description of Artificial Sequence: Synthetic polypeptide
HVKYCQYAFDLKCDSVCVNPYHYERVVSPGIDLSGLTLQS

SEQ ID NO: 3737 - protein, 40 aa, Artificial Sequence
  Description of Artificial Sequence: Synthetic polypeptide
QYAFDLKCDSVCVNPYHYERVVSPGIDLSGLTLQSNAPSS

SEQ ID NO: 3738 - protein, 40 aa, Artificial Sequence
  Description of Artificial Sequence: Synthetic polypeptide
YAFDLKCDSVCVNPYHYERVVSPGIDLSGLTLQSNAPSSM

SEQ ID NO: 3739 - protein, 40 aa, Artificial Sequence
  Description of Artificial Sequence: Synthetic polypeptide
PVHNELAFQPPISNHPAPEYWCSIAYFEMDVQVGETFKVP

SEQ ID NO: 3740 - protein, 40 aa, Artificial Sequence
  Description of Artificial Sequence: Synthetic polypeptide
VHNELAFQPPISNHPAPEYWCSIAYFEMDVQVGETFKVPS

SEQ ID NO: 3741 - protein, 40 aa, Artificial Sequence
  Description of Artificial Sequence: Synthetic polypeptide
LAFQPPISNHPAPEYWCSIAYFEMDVQVGETFKVPSSCPI

SEQ ID NO: 3742 - protein, 40 aa, Artificial Sequence
  Description of Artificial Sequence: Synthetic polypeptide
AFQPPISNHPAPEYWCSIAYFEMDVQVGETFKVPSSCPIV

SEQ ID NO: 3743 - protein, 40 aa, Artificial Sequence
  Description of Artificial Sequence: Synthetic polypeptide
FQPPISNHPAPEYWCSIAYFEMDVQVGETFKVPSSCPIVT

SEQ ID NO: 3744 - protein, 40 aa, Artificial Sequence
  Description of Artificial Sequence: Synthetic polypeptide
VFVQSYYLDREAGRAPGDAVHKIYPSAYIKVFDLRQCHRQ

SEQ ID NO: 3745 - protein, 40 aa, Artificial Sequence
  Description of Artificial Sequence: Synthetic polypeptide
PGDAVHKIYPSAYIKVFDLRQCHRQMQQQAATAQAAAAAQ

SEQ ID NO: 3746 - protein, 40 aa, Artificial Sequence
  Description of Artificial Sequence: Synthetic polypeptide
VCHDPKLPYHDFILEDAASPKCIMKEKKKPGETFFMCSCS

SEQ ID NO: 3747 - protein, 40 aa, Artificial Sequence
  Description of Artificial Sequence: Synthetic polypeptide
DPKLPYHDFILEDAASPKCIMKEKKKPGETFFMCSCSSDE

SEQ ID NO: 3748 - protein, 40 aa, Artificial Sequence
  Description of Artificial Sequence: Synthetic polypeptide
PKLPYHDFILEDAASPKCIMKEKKKPGETFFMCSCSSDEC

SEQ ID NO: 3749 - protein, 40 aa, Artificial Sequence
  Description of Artificial Sequence: Synthetic polypeptide
KLPYHDFILEDAASPKCIMKEKKKPGETFFMCSCSSDECN

SEQ ID NO: 3750 - protein, 40 aa, Artificial Sequence
  Description of Artificial Sequence: Synthetic polypeptide
QNPGPRHPEAASAAPPGASLLLLQQQQQQQQQQQQQQQQQ

SEQ ID NO: 3751 - protein, 40 aa, Artificial Sequence
  Description of Artificial Sequence: Synthetic polypeptide
YTRPPQGLAGQESDFTAPDVWYPGGMVSRVPYPSPTCVKS

SEQ ID NO: 3752 - protein, 40 aa, Artificial Sequence
  Description of Artificial Sequence: Synthetic polypeptide
GSCKVFFKRAAEGKQKYLCASRNDCTIDKFRRKNCPSCRL

SEQ ID NO: 3753 - protein, 40 aa, Artificial Sequence
  Description of Artificial Sequence: Synthetic polypeptide
AGMTLGARKLKKLGNLKLQEEGEASSTTSPTEETTQKLTV

SEQ ID NO: 3754 - protein, 40 aa, Artificial Sequence
  Description of Artificial Sequence: Synthetic polypeptide
MTLGARKLKKLGNLKLQEEGEASSTTSPTEETTQKLTVSH

SEQ ID NO: 3755 - protein, 40 aa, Artificial Sequence
  Description of Artificial Sequence: Synthetic polypeptide
TLGARKLKKLGNLKLQEEGEASSTTSPTEETTQKLTVSHI

SEQ ID NO: 3756 - protein, 40 aa, Artificial Sequence
  Description of Artificial Sequence: Synthetic polypeptide
ALLLFSIIPVDGLKNQKFFDELRMNYIKELDRIIACKRKN

SEQ ID NO: 3757 - protein, 40 aa, Artificial Sequence
  Description of Artificial Sequence: Synthetic polypeptide
MKNQKFFDELRMNYIKELDRIIACKRKNPTSCSRRFYQLT

SEQ ID NO: 3758 - protein, 40 aa, Artificial Sequence
  Description of Artificial Sequence: Synthetic polypeptide
KNQKFFDELRMNYIKELDRIIACKRKNPTSCSRRFYQLTK

SEQ ID NO: 3759 - protein, 40 aa, Artificial Sequence
  Description of Artificial Sequence: Synthetic polypeptide
NQKFFDELRMNYIKELDRIIACKRKNPTSCSRRFYQLTKL

SEQ ID NO: 3760 - protein, 40 aa, Artificial Sequence
  Description of Artificial Sequence: Synthetic polypeptide
AALSGGGGGGAEPGQALFNGDMEPEAGAGAGAAASSAADP

SEQ ID NO: 3761 - protein, 40 aa, Artificial Sequence
  Description of Artificial Sequence: Synthetic polypeptide
GGGGGGAEPGQALFNGDMEPEAGAGAGAAASSAADPAIPE

SEQ ID NO: 3762 - protein, 40 aa, Artificial Sequence
  Description of Artificial Sequence: Synthetic polypeptide
GDMEPEAGAGAGAAASSAADPAIPEEVWNIKQMIKLTQEH

SEQ ID NO: 3763 - protein, 40 aa, Artificial Sequence
  Description of Artificial Sequence: Synthetic polypeptide
ESLGNGTDFSVSSSASMDTVTSSSSSSLSVLPSSLSVFQN

SEQ ID NO: 3764 - protein, 40 aa, Artificial Sequence
  Description of Artificial Sequence: Synthetic polypeptide
SLGNGTDFSVSSSASMDTVTSSSSSSLSVLPSSLSVFQNP

SEQ ID NO: 3765 - protein, 40 aa, Artificial Sequence
  Description of Artificial Sequence: Synthetic polypeptide
GNGTDFSVSSSASMDTVTSSSSSSLSVLPSSLSVFQNPTD

SEQ ID NO: 3766 - protein, 40 aa, Artificial Sequence
  Description of Artificial Sequence: Synthetic polypeptide
DFSVSSSASMDTVTSSSSSSLSVLPSSLSVFQNPTDVARS

SEQ ID NO: 3767 - protein, 40 aa, Artificial Sequence
  Description of Artificial Sequence: Synthetic polypeptide
TSSSSSSLSVLPSSLSVFQNPTDVARSNPKSPQKPIVRVF

SEQ ID NO: 3768 - protein, 40 aa, Artificial Sequence
  Description of Artificial Sequence: Synthetic polypeptide
NVPLTTHNFVRKTFFTLAFCDFCRKLLFQGFRCQTCGYKF

SEQ ID NO: 3769 - protein, 40 aa, Artificial Sequence
  Description of Artificial Sequence: Synthetic polypeptide
PLTTHNFVRKTFFTLAFCDFCRKLLFQGFRCQTCGYKFHQ

SEQ ID NO: 3770 - protein, 40 aa, Artificial Sequence
  Description of Artificial Sequence: Synthetic polypeptide
THNFVRKTFFTLAFCDFCRKLLFQGFRCQTCGYKFHQRCS

SEQ ID NO: 3771 - protein, 40 aa, Artificial Sequence
  Description of Artificial Sequence: Synthetic polypeptide
HNFVRKTFFTLAFCDFCRKLLFQGFRCQTCGYKFHQRCST

SEQ ID NO: 3772 - protein, 40 aa, Artificial Sequence
  Description of Artificial Sequence: Synthetic polypeptide
NFVRKTFFTLAFCDFCRKLLFQGFRCQTCGYKFHQRCSTE

SEQ ID NO: 3773 - protein, 40 aa, Artificial Sequence
  Description of Artificial Sequence: Synthetic polypeptide
VRKTFFTLAFCDFCRKLLFQGFRCQTCGYKFHQRCSTEVP

SEQ ID NO: 3774 - protein, 40 aa, Artificial Sequence
  Description of Artificial Sequence: Synthetic polypeptide
RKTFFTLAFCDFCRKLLFQGFRCQTCGYKFHQRCSTEVPL

SEQ ID NO: 3775 - protein, 40 aa, Artificial Sequence
  Description of Artificial Sequence: Synthetic polypeptide
TLAFCDFCRKLLFQGFRCQTCGYKFHQRCSTEVPLMCVNY

SEQ ID NO: 3776 - protein, 40 aa, Artificial Sequence
  Description of Artificial Sequence: Synthetic polypeptide
LAFCDFCRKLLFQGFRCQTCGYKFHQRCSTEVPLMCVNYD

SEQ ID NO: 3777 - protein, 40 aa, Artificial Sequence
  Description of Artificial Sequence: Synthetic polypeptide
FCDFCRKLLFQGFRCQTCGYKFHQRCSTEVPLMCVNYDQL

SEQ ID NO: 3778 - protein, 40 aa, Artificial Sequence
  Description of Artificial Sequence: Synthetic polypeptide
QTCGYKFHQRCSTEVPLMCVNYDQLDLLFVSKFFEHHPIP

SEQ ID NO: 3779 - protein, 40 aa, Artificial Sequence
  Description of Artificial Sequence: Synthetic polypeptide
PVNIDDLIRDQGFRGDGGSTTGLSATPPASLPGSLTNVKA

SEQ ID NO: 3780 - protein, 40 aa, Artificial Sequence
  Description of Artificial Sequence: Synthetic polypeptide
VNIDDLIRDQGFRGDGGSTTGLSATPPASLPGSLTNVKAL

SEQ ID NO: 3781 - protein, 40 aa, Artificial Sequence
  Description of Artificial Sequence: Synthetic polypeptide
IDDLIRDQGFRGDGGSTTGLSATPPASLPGSLTNVKALQK

SEQ ID NO: 3782 - protein, 40 aa, Artificial Sequence
  Description of Artificial Sequence: Synthetic polypeptide
DDLIRDQGFRGDGGSTTGLSATPPASLPGSLTNVKALQKS

SEQ ID NO: 3783 - protein, 40 aa, Artificial Sequence
  Description of Artificial Sequence: Synthetic polypeptide
DLIRDQGFRGDGGSTTGLSATPPASLPGSLTNVKALQKSP

SEQ ID NO: 3784 - protein, 40 aa, Artificial Sequence
  Description of Artificial Sequence: Synthetic polypeptide
MIRDQGFRGDGGSTTGLSATPPASLPGSLTNVKALQKSPG

SEQ ID NO: 3785 - protein, 40 aa, Artificial Sequence
  Description of Artificial Sequence: Synthetic polypeptide
IRDQGFRGDGGSTTGLSATPPASLPGSLTNVKALQKSPGP

SEQ ID NO: 3786 - protein, 40 aa, Artificial Sequence
  Description of Artificial Sequence: Synthetic polypeptide
GFRGDGGSTTGLSATPPASLPGSLTNVKALQKSPGPQRER

SEQ ID NO: 3787 - protein, 40 aa, Artificial Sequence
  Description of Artificial Sequence: Synthetic polypeptide
SLPGSLTNVKALQKSPGPQRERKSSSSSEDRNRMKTLGRR

SEQ ID NO: 3788 - protein, 40 aa, Artificial Sequence
  Description of Artificial Sequence: Synthetic polypeptide
ELMTGQLPYSNINNRDQIIFMVGRGYLSPDLSKVRSNCPK

SEQ ID NO: 3789 - protein, 40 aa, Artificial Sequence
  Description of Artificial Sequence: Synthetic polypeptide
GQLPYSNINNRDQIIFMVGRGYLSPDLSKVRSNCPKAMKR

SEQ ID NO: 3790 - protein, 40 aa, Artificial Sequence
  Description of Artificial Sequence: Synthetic polypeptide
PYSNINNRDQIIFMVGRGYLSPDLSKVRSNCPKAMKRLMA

SEQ ID NO: 3791 - protein, 40 aa, Artificial Sequence
  Description of Artificial Sequence: Synthetic polypeptide
NNRDQIIFMVGRGYLSPDLSKVRSNCPKAMKRLMAECLKK

SEQ ID NO: 3792 - protein, 40 aa, Artificial Sequence
  Description of Artificial Sequence: Synthetic polypeptide
RDQIIFMVGRGYLSPDLSKVRSNCPKAMKRLMAECLKKKR

SEQ ID NO: 3793 - protein, 40 aa, Artificial Sequence
  Description of Artificial Sequence: Synthetic polypeptide
SLKFLSLDYIPQRKQEPIKDALMLFQRLQEKRMLEESNLS

SEQ ID NO: 3794 - protein, 40 aa, Artificial Sequence
  Description of Artificial Sequence: Synthetic polypeptide
QEKRMLEESNLSFLKELLFRINRLDLLITYLNTRKEEMER

SEQ ID NO: 3795 - protein, 40 aa, Artificial Sequence
  Description of Artificial Sequence: Synthetic polypeptide
IEMEKRVILGEGKLDILKRVCAQINKSLLKIINDYEEFSK

SEQ ID NO: 3796 - protein, 40 aa, Artificial Sequence
  Description of Artificial Sequence: Synthetic polypeptide
EGKLDILKRVCAQINKSLLKIINDYEEFSKERSSSLEGSP

SEQ ID NO: 3797 - protein, 40 aa, Artificial Sequence
  Description of Artificial Sequence: Synthetic polypeptide
MDILKRVCAQINKSLLKIINDYEEFSKERSSSLEGSPDEF

SEQ ID NO: 3798 - protein, 40 aa, Artificial Sequence
  Description of Artificial Sequence: Synthetic polypeptide
MKRVCAQINKSLLKIINDYEEFSKERSSSLEGSPDEFSNG

SEQ ID NO: 3799 - protein, 40 aa, Artificial Sequence
  Description of Artificial Sequence: Synthetic polypeptide
MKCPSLAGKPKVFFIQACQGDNYQKGIPVETDSEEQPYLE

SEQ ID NO: 3800 - protein, 40 aa, Artificial Sequence
  Description of Artificial Sequence: Synthetic polypeptide
CPRGDDILTILTEVNYEVSNKDDKKNMGKQMPQPTFTLRK

SEQ ID NO: 3801 - protein, 40 aa, Artificial Sequence
  Description of Artificial Sequence: Synthetic polypeptide
PRGDDILTILTEVNYEVSNKDDKKNMGKQMPQPTFTLRKK

SEQ ID NO: 3802 - protein, 40 aa, Artificial Sequence
  Description of Artificial Sequence: Synthetic polypeptide
RGDDILTILTEVNYEVSNKDDKKNMGKQMPQPTFTLRKKL

SEQ ID NO: 3803 - protein, 40 aa, Artificial Sequence
  Description of Artificial Sequence: Synthetic polypeptide
GDDILTILTEVNYEVSNKDDKKNMGKQMPQPTFTLRKKLV

SEQ ID NO: 3804 - protein, 40 aa, Artificial Sequence
  Description of Artificial Sequence: Synthetic polypeptide
DDILTILTEVNYEVSNKDDKKNMGKQMPQPTFTLRKKLVF

SEQ ID NO: 3805 - protein, 40 aa, Artificial Sequence
  Description of Artificial Sequence: Synthetic polypeptide
RRQKRDWVIPPISCPENEKGPFPKNLVQIKSNKDKEGKVF

SEQ ID NO: 3806 - protein, 40 aa, Artificial Sequence
  Description of Artificial Sequence: Synthetic polypeptide
RQKRDWVIPPISCPENEKGPFPKNLVQIKSNKDKEGKVFY

SEQ ID NO: 3807 - protein, 40 aa, Artificial Sequence
  Description of Artificial Sequence: Synthetic polypeptide
QKRDWVIPPISCPENEKGPFPKNLVQIKSNKDKEGKVFYS

SEQ ID NO: 3808 - protein, 40 aa, Artificial Sequence
  Description of Artificial Sequence: Synthetic polypeptide
NEKGPFPKNLVQIKSNKDKEGKVFYSITGQGADTPPVGVF

SEQ ID NO: 3809 - protein, 40 aa, Artificial Sequence
  Description of Artificial Sequence: Synthetic polypeptide
ISVVTTGLDRESFPTYTLVVQAADLQGEGLSTTATAVITV

SEQ ID NO: 3810 - protein, 40 aa, Artificial Sequence
  Description of Artificial Sequence: Synthetic polypeptide
SVVTTGLDRESFPTYTLVVQAADLQGEGLSTTATAVITVT

SEQ ID NO: 3811 - protein, 40 aa, Artificial Sequence
  Description of Artificial Sequence: Synthetic polypeptide
DRESFPTYTLVVQAADLQGEGLSTTATAVITVTDTNDNPP

SEQ ID NO: 3812 - protein, 40 aa, Artificial Sequence
  Description of Artificial Sequence: Synthetic polypeptide
TYTLVVQAADLQGEGLSTTATAVITVTDTNDNPPIFNPTT

SEQ ID NO: 3813 - protein, 40 aa, Artificial Sequence
  Description of Artificial Sequence: Synthetic polypeptide
FTAELTHGASANWTIQYNDPTQESIILKPKMALEVGDYKI

SEQ ID NO: 3814 - protein, 40 aa, Artificial Sequence
  Description of Artificial Sequence: Synthetic polypeptide
HGASANWTIQYNDPTQESIILKPKMALEVGDYKINLKLMD

SEQ ID NO: 3815 - protein, 40 aa, Artificial Sequence
  Description of Artificial Sequence: Synthetic polypeptide
ANWTIQYNDPTQESIILKPKMALEVGDYKINLKLMDNQNK

SEQ ID NO: 3816 - protein, 40 aa, Artificial Sequence
  Description of Artificial Sequence: Synthetic polypeptide
QESIILKPKMALEVGDYKINLKLMDNQNKDQVTTLEVSVC

SEQ ID NO: 3817 - protein, 40 aa, Artificial Sequence
  Description of Artificial Sequence: Synthetic polypeptide
GTLSSLETVSTQELYSIPEDQEPEDQEPEEPTPAPWARLW

SEQ ID NO: 3818 - protein, 40 aa, Artificial Sequence
  Description of Artificial Sequence: Synthetic polypeptide
SSLETVSTQELYSIPEDQEPEDQEPEEPTPAPWARLWALQ

SEQ ID NO: 3819 - protein, 40 aa, Artificial Sequence
  Description of Artificial Sequence: Synthetic polypeptide
ETVSTQELYSIPEDQEPEDQEPEEPTPAPWARLWALQDGF

SEQ ID NO: 3820 - protein, 40 aa, Artificial Sequence
  Description of Artificial Sequence: Synthetic polypeptide
ALQDGFANLECVNDNYWFGRDKSCEYCFDEPLLKRTDKYR

SEQ ID NO: 3821 - protein, 40 aa, Artificial Sequence
  Description of Artificial Sequence: Synthetic polypeptide
KKHFRIFREVGPKNSYIAYIEDHSGNGTFVNTELVGKGKR

SEQ ID NO: 3822 - protein, 40 aa, Artificial Sequence
  Description of Artificial Sequence: Synthetic polypeptide
FRIFREVGPKNSYIAYIEDHSGNGTFVNTELVGKGKRRPL

SEQ ID NO: 3823 - protein, 40 aa, Artificial Sequence
  Description of Artificial Sequence: Synthetic polypeptide
REVGPKNSYIAYIEDHSGNGTFVNTELVGKGKRRPLNNNS

SEQ ID NO: 3824 - protein, 40 aa, Artificial Sequence
  Description of Artificial Sequence: Synthetic polypeptide
GPKNSYIAYIEDHSGNGTFVNTELVGKGKRRPLNNNSEIA

SEQ ID NO: 3825 - protein, 40 aa, Artificial Sequence
  Description of Artificial Sequence: Synthetic polypeptide
PKNSYIAYIEDHSGNGTFVNTELVGKGKRRPLNNNSEIAL

SEQ ID NO: 3826 - protein, 40 aa, Artificial Sequence
  Description of Artificial Sequence: Synthetic polypeptide
EDHSGNGTFVNTELVGKGKRRPLNNNSEIALSLSRNKVFV

SEQ ID NO: 3827 - protein, 40 aa, Artificial Sequence
  Description of Artificial Sequence: Synthetic polypeptide
DHSGNGTFVNTELVGKGKRRPLNNNSEIALSLSRNKVFVF

SEQ ID NO: 3828 - protein, 40 aa, Artificial Sequence
  Description of Artificial Sequence: Synthetic polypeptide
SGNGTFVNTELVGKGKRRPLNNNSEIALSLSRNKVFVFFD

SEQ ID NO: 3829 - protein, 40 aa, Artificial Sequence
  Description of Artificial Sequence: Synthetic polypeptide
GNGTFVNTELVGKGKRRPLNNNSEIALSLSRNKVFVFFDL

SEQ ID NO: 3830 - protein, 40 aa, Artificial Sequence
  Description of Artificial Sequence: Synthetic polypeptide
NGTFVNTELVGKGKRRPLNNNSEIALSLSRNKVFVFFDLT

SEQ ID NO: 3831 - protein, 40 aa, Artificial Sequence
  Description of Artificial Sequence: Synthetic polypeptide
VNTELVGKGKRRPLNNNSEIALSLSRNKVFVFFDLTVDDQ

SEQ ID NO: 3832 - protein, 40 aa, Artificial Sequence
  Description of Artificial Sequence: Synthetic polypeptide
KGKRRPLNNNSEIALSLSRNKVFVFFDLTVDDQSVYPKAL

SEQ ID NO: 3833 - protein, 40 aa, Artificial Sequence
  Description of Artificial Sequence: Synthetic polypeptide
RKTCKKVAIKIISKRKFAIGSAREADPALNVETEIEILKK

SEQ ID NO: 3834 - protein, 40 aa, Artificial Sequence
  Description of Artificial Sequence: Synthetic polypeptide
KTCKKVAIKIISKRKFAIGSAREADPALNVETEIEILKKL

SEQ ID NO: 3835 - protein, 40 aa, Artificial Sequence
  Description of Artificial Sequence: Synthetic polypeptide
TCKKVAIKIISKRKFAIGSAREADPALNVETEIEILKKLN

SEQ ID NO: 3836 - protein, 40 aa, Artificial Sequence
  Description of Artificial Sequence: Synthetic polypeptide
CKKVAIKIISKRKFAIGSAREADPALNVETEIEILKKLNH

SEQ ID NO: 3837 - protein, 40 aa, Artificial Sequence
  Description of Artificial Sequence: Synthetic polypeptide
SKRKFAIGSAREADPALNVETEIEILKKLNHPCIIKIKNF

SEQ ID NO: 3838 - protein, 40 aa, Artificial Sequence
  Description of Artificial Sequence: Synthetic polypeptide
SAREADPALNVETEIEILKKLNHPCIIKIKNFFDAEDYYI

SEQ ID NO: 3839 - protein, 40 aa, Artificial Sequence
  Description of Artificial Sequence: Synthetic polypeptide
READPALNVETEIEILKKLNHPCIIKIKNFFDAEDYYIVL

SEQ ID NO: 3840 - protein, 40 aa, Artificial Sequence
  Description of Artificial Sequence: Synthetic polypeptide
ADPALNVETEIEILKKLNHPCIIKIKNFFDAEDYYIVLEL

SEQ ID NO: 3841 - protein, 40 aa, Artificial Sequence
  Description of Artificial Sequence: Synthetic polypeptide
DPALNVETEIEILKKLNHPCIIKIKNFFDAEDYYIVLELM

SEQ ID NO: 3842 - protein, 40 aa, Artificial Sequence
  Description of Artificial Sequence: Synthetic polypeptide
ALNVETEIEILKKLNHPCIIKIKNFFDAEDYYIVLELMEG

SEQ ID NO: 3843 - protein, 40 aa, Artificial Sequence
  Description of Artificial Sequence: Synthetic polypeptide
ETEIEILKKLNHPCIIKIKNFFDAEDYYIVLELMEGGELF

SEQ ID NO: 3844 - protein, 40 aa, Artificial Sequence
  Description of Artificial Sequence: Synthetic polypeptide
KNFFDAEDYYIVLELMEGGELFDKVVGNKRLKEATCKLYF

SEQ ID NO: 3845 - protein, 40 aa, Artificial Sequence
  Description of Artificial Sequence: Synthetic polypeptide
SLMRTLCGTPTYLAPEVLVSVGTAGYNRAVDCWSLGVILF

SEQ ID NO: 3846 - protein, 40 aa, Artificial Sequence
  Description of Artificial Sequence: Synthetic polypeptide
LMRTLCGTPTYLAPEVLVSVGTAGYNRAVDCWSLGVILFI

SEQ ID NO: 3847 - protein, 40 aa, Artificial Sequence
  Description of Artificial Sequence: Synthetic polypeptide
RTLCGTPTYLAPEVLVSVGTAGYNRAVDCWSLGVILFICL

SEQ ID NO: 3848 - protein, 40 aa, Artificial Sequence
  Description of Artificial Sequence: Synthetic polypeptide
LCGTPTYLAPEVLVSVGTAGYNRAVDCWSLGVILFICLSG

SEQ ID NO: 3849 - protein, 40 aa, Artificial Sequence
  Description of Artificial Sequence: Synthetic polypeptide
CGTPTYLAPEVLVSVGTAGYNRAVDCWSLGVILFICLSGY

SEQ ID NO: 3850 - protein, 40 aa, Artificial Sequence
  Description of Artificial Sequence: Synthetic polypeptide
TPTYLAPEVLVSVGTAGYNRAVDCWSLGVILFICLSGYPP

SEQ ID NO: 3851 - protein, 40 aa, Artificial Sequence
  Description of Artificial Sequence: Synthetic polypeptide
PTYLAPEVLVSVGTAGYNRAVDCWSLGVILFICLSGYPPF

SEQ ID NO: 3852 - protein, 40 aa, Artificial Sequence
  Description of Artificial Sequence: Synthetic polypeptide
TYLAPEVLVSVGTAGYNRAVDCWSLGVILFICLSGYPPFS

SEQ ID NO: 3853 - protein, 40 aa, Artificial Sequence
  Description of Artificial Sequence: Synthetic polypeptide
YLAPEVLVSVGTAGYNRAVDCWSLGVILFICLSGYPPFSE

SEQ ID NO: 3854 - protein, 40 aa, Artificial Sequence
  Description of Artificial Sequence: Synthetic polypeptide
MAPEVLVSVGTAGYNRAVDCWSLGVILFICLSGYPPFSEH

SEQ ID NO: 3855 - protein, 40 aa, Artificial Sequence
  Description of Artificial Sequence: Synthetic polypeptide
PEVLVSVGTAGYNRAVDCWSLGVILFICLSGYPPFSEHRT

SEQ ID NO: 3856 - protein, 40 aa, Artificial Sequence
  Description of Artificial Sequence: Synthetic polypeptide
LVSVGTAGYNRAVDCWSLGVILFICLSGYPPFSEHRTQVS

SEQ ID NO: 3857 - protein, 40 aa, Artificial Sequence
  Description of Artificial Sequence: Synthetic polypeptide
GTAGYNRAVDCWSLGVILFICLSGYPPFSEHRTQVSLKDQ

SEQ ID NO: 3858 - protein, 40 aa, Artificial Sequence
  Description of Artificial Sequence: Synthetic polypeptide
DLLSEENESTALPQVLAQPSTSRKRPREGEAEGAETTKRP

SEQ ID NO: 3859 - protein, 40 aa, Artificial Sequence
  Description of Artificial Sequence: Synthetic polypeptide
LLSEENESTALPQVLAQPSTSRKRPREGEAEGAETTKRPA

SEQ ID NO: 3860 - protein, 40 aa, Artificial Sequence
  Description of Artificial Sequence: Synthetic polypeptide
ILAYGNQESKLIILASGGPQALVNIMRTYTYEKLLWTTSR

SEQ ID NO: 3861 - protein, 40 aa, Artificial Sequence
  Description of Artificial Sequence: Synthetic polypeptide
NHAPLREQGAIPRLVQLLVRAHQDTQRRTSMGGTQQQFVE

SEQ ID NO: 3862 - protein, 40 aa, Artificial Sequence
  Description of Artificial Sequence: Synthetic polypeptide
HAPLREQGAIPRLVQLLVRAHQDTQRRTSMGGTQQQFVEG

SEQ ID NO: 3863 - protein, 40 aa, Artificial Sequence
  Description of Artificial Sequence: Synthetic polypeptide
ENALGLDQQFAGLDLNSSDNQSGGSTASKGRYIPPHLRNR

SEQ ID NO: 3864 - protein, 40 aa, Artificial Sequence
  Description of Artificial Sequence: Synthetic polypeptide
IPPHLRNREATKGFYDKDSSGWSSSKDKDAYSSFGSRSDS

SEQ ID NO: 3865 - protein, 40 aa, Artificial Sequence
  Description of Artificial Sequence: Synthetic polypeptide
AQTGSGKTAAFLLPILSQIYSDGPGEALRAMKENGRYGRR

SEQ ID NO: 3866 - protein, 40 aa, Artificial Sequence
  Description of Artificial Sequence: Synthetic polypeptide
QTGSGKTAAFLLPILSQIYSDGPGEALRAMKENGRYGRRK

SEQ ID NO: 3867 - protein, 40 aa, Artificial Sequence
  Description of Artificial Sequence: Synthetic polypeptide
GSGKTAAFLLPILSQIYSDGPGEALRAMKENGRYGRRKQY

SEQ ID NO: 3868 - protein, 40 aa, Artificial Sequence
  Description of Artificial Sequence: Synthetic polypeptide
SGKTAAFLLPILSQIYSDGPGEALRAMKENGRYGRRKQYP

SEQ ID NO: 3869 - protein, 40 aa, Artificial Sequence
  Description of Artificial Sequence: Synthetic polypeptide
KTAAFLLPILSQIYSDGPGEALRAMKENGRYGRRKQYPIS

SEQ ID NO: 3870 - protein, 40 aa, Artificial Sequence
  Description of Artificial Sequence: Synthetic polypeptide
SQIYSDGPGEALRAMKENGRYGRRKQYPISLVLAPTRELA

SEQ ID NO: 3871 - protein, 40 aa, Artificial Sequence
  Description of Artificial Sequence: Synthetic polypeptide
QIYSDGPGEALRAMKENGRYGRRKQYPISLVLAPTRELAV

SEQ ID NO: 3872 - protein, 40 aa, Artificial Sequence
  Description of Artificial Sequence: Synthetic polypeptide
IYSDGPGEALRAMKENGRYGRRKQYPISLVLAPTRELAVQ

SEQ ID NO: 3873 - protein, 40 aa, Artificial Sequence
  Description of Artificial Sequence: Synthetic polypeptide
YSDGPGEALRAMKENGRYGRRKQYPISLVLAPTRELAVQI

SEQ ID NO: 3874 - protein, 40 aa, Artificial Sequence
  Description of Artificial Sequence: Synthetic polypeptide
EALRAMKENGRYGRRKQYPISLVLAPTRELAVQIYEEARK

SEQ ID NO: 3875 - protein, 40 aa, Artificial Sequence
  Description of Artificial Sequence: Synthetic polypeptide
FEPQIRRIVEQDTMPPKGVRHTMMFSATFPKEIQMLARDF

SEQ ID NO: 3876 - protein, 40 aa, Artificial Sequence
  Description of Artificial Sequence: Synthetic polypeptide
RHTMMFSATFPKEIQMLARDFLDEYIFLAVGRVGSTSENI

SEQ ID NO: 3877 - protein, 40 aa, Artificial Sequence
  Description of Artificial Sequence: Synthetic polypeptide
LDEYIFLAVGRVGSTSENITQKVVWVEESDKRSFLLDLLN

SEQ ID NO: 3878 - protein, 40 aa, Artificial Sequence
  Description of Artificial Sequence: Synthetic polypeptide
MAVGRVGSTSENITQKVVWVEESDKRSFLLDLLNATGKDS

SEQ ID NO: 3879 - protein, 40 aa, Artificial Sequence
  Description of Artificial Sequence: Synthetic polypeptide
QVLIMTCYVALNVLKNGYLSLSDINLLVFDECHLAILDHP

SEQ ID NO: 3880 - protein, 40 aa, Artificial Sequence
  Description of Artificial Sequence: Synthetic polypeptide
TASILNGKCDPEELEEKIQKLEKILKSNAETATDLVVLDR

SEQ ID NO: 3881 - protein, 40 aa, Artificial Sequence
  Description of Artificial Sequence: Synthetic polypeptide
QPCEIVVDCGPFTDRSGLYERLLMELEEALNFINDCNISV

SEQ ID NO: 3882 - protein, 40 aa, Artificial Sequence
  Description of Artificial Sequence: Synthetic polypeptide
VVDCGPFTDRSGLYERLLMELEEALNFINDCNISVHSKER

SEQ ID NO: 3883 - protein, 40 aa, Artificial Sequence
  Description of Artificial Sequence: Synthetic polypeptide
CGPFTDRSGLYERLLMELEEALNFINDCNISVHSKERDST

SEQ ID NO: 3884 - protein, 40 aa, Artificial Sequence
  Description of Artificial Sequence: Synthetic polypeptide
GPFTDRSGLYERLLMELEEALNFINDCNISVHSKERDSTL

SEQ ID NO: 3885 - protein, 40 aa, Artificial Sequence
  Description of Artificial Sequence: Synthetic polypeptide
PFTDRSGLYERLLMELEEALNFINDCNISVHSKERDSTLI

SEQ ID NO: 3886 - protein, 40 aa, Artificial Sequence
  Description of Artificial Sequence: Synthetic polypeptide
SGLYERLLMELEEALNFINDCNISVHSKERDSTLISKQIL

SEQ ID NO: 3887 - protein, 40 aa, Artificial Sequence
  Description of Artificial Sequence: Synthetic polypeptide
ELEEALNFINDCNISVHSKERDSTLISKQILSDCRAVLVV

SEQ ID NO: 3888 - protein, 40 aa, Artificial Sequence
  Description of Artificial Sequence: Synthetic polypeptide
LEEALNFINDCNISVHSKERDSTLISKQILSDCRAVLVVL

SEQ ID NO: 3889 - protein, 40 aa, Artificial Sequence
  Description of Artificial Sequence: Synthetic polypeptide
ALNFINDCNISVHSKERDSTLISKQILSDCRAVLVVLGPW

SEQ ID NO: 3890 - protein, 40 aa, Artificial Sequence
  Description of Artificial Sequence: Synthetic polypeptide
LNFINDCNISVHSKERDSTLISKQILSDCRAVLVVLGPWC

SEQ ID NO: 3891 - protein, 40 aa, Artificial Sequence
  Description of Artificial Sequence: Synthetic polypeptide
NFINDCNISVHSKERDSTLISKQILSDCRAVLVVLGPWCA

SEQ ID NO: 3892 - protein, 40 aa, Artificial Sequence
  Description of Artificial Sequence: Synthetic polypeptide
NDCNISVHSKERDSTLISKQILSDCRAVLVVLGPWCADKV

SEQ ID NO: 3893 - protein, 40 aa, Artificial Sequence
  Description of Artificial Sequence: Synthetic polypeptide
HSKERDSTLISKQILSDCRAVLVVLGPWCADKVAGMMVRE

SEQ ID NO: 3894 - protein, 40 aa, Artificial Sequence
  Description of Artificial Sequence: Synthetic polypeptide
ERDSTLISKQILSDCRAVLVVLGPWCADKVAGMMVRELQK

SEQ ID NO: 3895 - protein, 40 aa, Artificial Sequence
  Description of Artificial Sequence: Synthetic polypeptide
LSDCRAVLVVLGPWCADKVAGMMVRELQKYIKHEQEELHR

SEQ ID NO: 3896 - protein, 40 aa, Artificial Sequence
  Description of Artificial Sequence: Synthetic polypeptide
AVLVVLGPWCADKVAGMMVRELQKYIKHEQEELHRKFLLF

SEQ ID NO: 3897 - protein, 40 aa, Artificial Sequence
  Description of Artificial Sequence: Synthetic polypeptide
GPWCADKVAGMMVRELQKYIKHEQEELHRKFLLFTDTFLR

SEQ ID NO: 3898 - protein, 40 aa, Artificial Sequence
  Description of Artificial Sequence: Synthetic polypeptide
SLDLKFVTPKVIKLLEILRKYKPYERQQFESVEWYNNRNQ

SEQ ID NO: 3899 - protein, 40 aa, Artificial Sequence
  Description of Artificial Sequence: Synthetic polypeptide
DLKFVTPKVIKLLEILRKYKPYERQQFESVEWYNNRNQDN

SEQ ID NO: 3900 - protein, 40 aa, Artificial Sequence
  Description of Artificial Sequence: Synthetic polypeptide
MKFVTPKVIKLLEILRKYKPYERQQFESVEWYNNRNQDNY

SEQ ID NO: 3901 - protein, 40 aa, Artificial Sequence
  Description of Artificial Sequence: Synthetic polypeptide
KVIKLLEILRKYKPYERQQFESVEWYNNRNQDNYVSWSDS

SEQ ID NO: 3902 - protein, 40 aa, Artificial Sequence
  Description of Artificial Sequence: Synthetic polypeptide
MLEILRKYKPYERQQFESVEWYNNRNQDNYVSWSDSEDDD

SEQ ID NO: 3903 - protein, 40 aa, Artificial Sequence
  Description of Artificial Sequence: Synthetic polypeptide
LEILRKYKPYERQQFESVEWYNNRNQDNYVSWSDSEDDDE

SEQ ID NO: 3904 - protein, 40 aa, Artificial Sequence
  Description of Artificial Sequence: Synthetic polypeptide
PYERQQFESVEWYNNRNQDNYVSWSDSEDDDEDEEIEEKE

SEQ ID NO: 3905 - protein, 40 aa, Artificial Sequence
  Description of Artificial Sequence: Synthetic polypeptide
ERQQFESVEWYNNRNQDNYVSWSDSEDDDEDEEIEEKEKP

SEQ ID NO: 3906 - protein, 40 aa, Artificial Sequence
  Description of Artificial Sequence: Synthetic polypeptide
WYNNRNQDNYVSWSDSEDDDEDEEIEEKEKPETNFPSPFT

SEQ ID NO: 3907 - protein, 40 aa, Artificial Sequence
  Description of Artificial Sequence: Synthetic polypeptide
AVVLNRLIKEAGKQDPELAYISSNFITGHGIGKNQPRNKQ

SEQ ID NO: 3908 - protein, 40 aa, Artificial Sequence
  Description of Artificial Sequence: Synthetic polypeptide
EGVDIPKCNLVVRFDLPTEYRSYVQSKGRARAPISNYIML

SEQ ID NO: 3909 - protein, 40 aa, Artificial Sequence
  Description of Artificial Sequence: Synthetic polypeptide
MVVRFDLPTEYRSYVQSKGRARAPISNYIMLADTDKIKSF

SEQ ID NO: 3910 - protein, 40 aa, Artificial Sequence
  Description of Artificial Sequence: Synthetic polypeptide
VVRFDLPTEYRSYVQSKGRARAPISNYIMLADTDKIKSFE

SEQ ID NO: 3911 - protein, 40 aa, Artificial Sequence
  Description of Artificial Sequence: Synthetic polypeptide
VRFDLPTEYRSYVQSKGRARAPISNYIMLADTDKIKSFEE

SEQ ID NO: 3912 - protein, 40 aa, Artificial Sequence
  Description of Artificial Sequence: Synthetic polypeptide
RFDLPTEYRSYVQSKGRARAPISNYIMLADTDKIKSFEED

SEQ ID NO: 3913 - protein, 40 aa, Artificial Sequence
  Description of Artificial Sequence: Synthetic polypeptide
FDLPTEYRSYVQSKGRARAPISNYIMLADTDKIKSFEEDL

SEQ ID NO: 3914 - protein, 40 aa, Artificial Sequence
  Description of Artificial Sequence: Synthetic polypeptide
DLPTEYRSYVQSKGRARAPISNYIMLADTDKIKSFEEDLK

SEQ ID NO: 3915 - protein, 40 aa, Artificial Sequence
  Description of Artificial Sequence: Synthetic polypeptide
MPTEYRSYVQSKGRARAPISNYIMLADTDKIKSFEEDLKT

SEQ ID NO: 3916 - protein, 40 aa, Artificial Sequence
  Description of Artificial Sequence: Synthetic polypeptide
TEYRSYVQSKGRARAPISNYIMLADTDKIKSFEEDLKTYK

SEQ ID NO: 3917 - protein, 40 aa, Artificial Sequence
  Description of Artificial Sequence: Synthetic polypeptide
RSYVQSKGRARAPISNYIMLADTDKIKSFEEDLKTYKAIE

SEQ ID NO: 3918 - protein, 40 aa, Artificial Sequence
  Description of Artificial Sequence: Synthetic polypeptide
IMLADTDKIKSFEEDLKTYKAIEKILRNKCSKSVDTGETD

SEQ ID NO: 3919 - protein, 40 aa, Artificial Sequence
  Description of Artificial Sequence: Synthetic polypeptide
MLADTDKIKSFEEDLKTYKAIEKILRNKCSKSVDTGETDI

SEQ ID NO: 3920 - protein, 40 aa, Artificial Sequence
  Description of Artificial Sequence: Synthetic polypeptide
LADTDKIKSFEEDLKTYKAIEKILRNKCSKSVDTGETDID

SEQ ID NO: 3921 - protein, 40 aa, Artificial Sequence
  Description of Artificial Sequence: Synthetic polypeptide
DTDKIKSFEEDLKTYKAIEKILRNKCSKSVDTGETDIDPV

SEQ ID NO: 3922 - protein, 40 aa, Artificial Sequence
  Description of Artificial Sequence: Synthetic polypeptide
KIKSFEEDLKTYKAIEKILRNKCSKSVDTGETDIDPVMDD

SEQ ID NO: 3923 - protein, 40 aa, Artificial Sequence
  Description of Artificial Sequence: Synthetic polypeptide
IGELDDHLMPVGKETVKYEEELDLHDEEETSVPGRPGSTK

SEQ ID NO: 3924 - protein, 40 aa, Artificial Sequence
  Description of Artificial Sequence: Synthetic polypeptide
ELDDHLMPVGKETVKYEEELDLHDEEETSVPGRPGSTKRR

SEQ ID NO: 3925 - protein, 40 aa, Artificial Sequence
  Description of Artificial Sequence: Synthetic polypeptide
FPVYTRSGEVTISIELKKSGFMLSLQMLELITRLHQYIFS

SEQ ID NO: 3926 - protein, 40 aa, Artificial Sequence
  Description of Artificial Sequence: Synthetic polypeptide
VYTRSGEVTISIELKKSGFMLSLQMLELITRLHQYIFSHI

SEQ ID NO: 3927 - protein, 40 aa, Artificial Sequence
  Description of Artificial Sequence: Synthetic polypeptide
KSGFMLSLQMLELITRLHQYIFSHILRLEKPALEFKPTDA

SEQ ID NO: 3928 - protein, 40 aa, Artificial Sequence
  Description of Artificial Sequence: Synthetic polypeptide
DIDFKFMEDIEKSEARIGIPSTKYTKETPFVFKLEDYQDA

SEQ ID NO: 3929 - protein, 40 aa, Artificial Sequence
  Description of Artificial Sequence: Synthetic polypeptide
DFKFMEDIEKSEARIGIPSTKYTKETPFVFKLEDYQDAVI

SEQ ID NO: 3930 - protein, 40 aa, Artificial Sequence
  Description of Artificial Sequence: Synthetic polypeptide
KFMEDIEKSEARIGIPSTKYTKETPFVFKLEDYQDAVIIP

SEQ ID NO: 3931 - protein, 40 aa, Artificial Sequence
  Description of Artificial Sequence: Synthetic polypeptide
MSVNCRTLLSESPGKLHVEVSADLTAINGLSYNQNLANGS

SEQ ID NO: 3932 - protein, 40 aa, Artificial Sequence
  Description of Artificial Sequence: Synthetic polypeptide
GDSFLKHAITTYLFCTYPDAHEGRLSYMRSKKVSNCNLYR

SEQ ID NO: 3933 - protein, 40 aa, Artificial Sequence
  Description of Artificial Sequence: Synthetic polypeptide
FLKHAITTYLFCTYPDAHEGRLSYMRSKKVSNCNLYRLGK

SEQ ID NO: 3934 - protein, 40 aa, Artificial Sequence
  Description of Artificial Sequence: Synthetic polypeptide
APKEEADYEDDFLEYDQEHIRFIDNMLMGSGAFVKKISLS

SEQ ID NO: 3935 - protein, 40 aa, Artificial Sequence
  Description of Artificial Sequence: Synthetic polypeptide
DYEDDFLEYDQEHIRFIDNMLMGSGAFVKKISLSPFSTTD

SEQ ID NO: 3936 - protein, 40 aa, Artificial Sequence
  Description of Artificial Sequence: Synthetic polypeptide
EDDFLEYDQEHIRFIDNMLMGSGAFVKKISLSPFSTTDSA

SEQ ID NO: 3937 - protein, 40 aa, Artificial Sequence
  Description of Artificial Sequence: Synthetic polypeptide
DQEHIRFIDNMLMGSGAFVKKISLSPFSTTDSAYEWKMPK

SEQ ID NO: 3938 - protein, 40 aa, Artificial Sequence
  Description of Artificial Sequence: Synthetic polypeptide
IRFIDNMLMGSGAFVKKISLSPFSTTDSAYEWKMPKKSSL

SEQ ID NO: 3939 - protein, 40 aa, Artificial Sequence
  Description of Artificial Sequence: Synthetic polypeptide
RFIDNMLMGSGAFVKKISLSPFSTTDSAYEWKMPKKSSLG

SEQ ID NO: 3940 - protein, 40 aa, Artificial Sequence
  Description of Artificial Sequence: Synthetic polypeptide
SIADCVEALLGCYLTSCGERAAQLFLCSLGLKVLPVIKRT

SEQ ID NO: 3941 - protein, 40 aa, Artificial Sequence
  Description of Artificial Sequence: Synthetic polypeptide
IADCVEALLGCYLTSCGERAAQLFLCSLGLKVLPVIKRTD

SEQ ID NO: 3942 - protein, 40 aa, Artificial Sequence
  Description of Artificial Sequence: Synthetic polypeptide
ALLALLAALCPASRALEEKKVCQGTSNKLTQLGTFEDHFL

SEQ ID NO: 3943 - protein, 40 aa, Artificial Sequence
  Description of Artificial Sequence: Synthetic polypeptide
LNTVERIPLENLQIIRGNMYYENSYALAVLSNYDANKTGL

SEQ ID NO: 3944 - protein, 40 aa, Artificial Sequence
  Description of Artificial Sequence: Synthetic polypeptide
MEEDGVRKCKKCEGPCRKVCNGIGIGEFKDSLSINATNIK

SEQ ID NO: 3945 - protein, 40 aa, Artificial Sequence
  Description of Artificial Sequence: Synthetic polypeptide
AFRGDSFTHTPPLDPQELDILKTVKEITGFLLIQAWPENR

SEQ ID NO: 3946 - protein, 40 aa, Artificial Sequence
  Description of Artificial Sequence: Synthetic polypeptide
QHGQFSLAVVSLNITSLGLRSLKEISDGDVIISGNKNLCY

SEQ ID NO: 3947 - protein, 40 aa, Artificial Sequence
  Description of Artificial Sequence: Synthetic polypeptide
SLKEISDGDVIISGNKNLCYANTINWKKLFGTSGQKTKII

SEQ ID NO: 3948 - protein, 40 aa, Artificial Sequence
  Description of Artificial Sequence: Synthetic polypeptide
LKEISDGDVIISGNKNLCYANTINWKKLFGTSGQKTKIIS

SEQ ID NO: 3949 - protein, 40 aa, Artificial Sequence
  Description of Artificial Sequence: Synthetic polypeptide
ISDGDVIISGNKNLCYANTINWKKLFGTSGQKTKIISNRG

SEQ ID NO: 3950 - protein, 40 aa, Artificial Sequence
  Description of Artificial Sequence: Synthetic polypeptide
SDGDVIISGNKNLCYANTINWKKLFGTSGQKTKIISNRGE

SEQ ID NO: 3951 - protein, 40 aa, Artificial Sequence
  Description of Artificial Sequence: Synthetic polypeptide
DGDVIISGNKNLCYANTINWKKLFGTSGQKTKIISNRGEN

SEQ ID NO: 3952 - protein, 40 aa, Artificial Sequence
  Description of Artificial Sequence: Synthetic polypeptide
GDVIISGNKNLCYANTINWKKLFGTSGQKTKIISNRGENS

SEQ ID NO: 3953 - protein, 40 aa, Artificial Sequence
  Description of Artificial Sequence: Synthetic polypeptide
DVIISGNKNLCYANTINWKKLFGTSGQKTKIISNRGENSC

SEQ ID NO: 3954 - protein, 40 aa, Artificial Sequence
  Description of Artificial Sequence: Synthetic polypeptide
VIISGNKNLCYANTINWKKLFGTSGQKTKIISNRGENSCK

SEQ ID NO: 3955 - protein, 40 aa, Artificial Sequence
  Description of Artificial Sequence: Synthetic polypeptide
IISGNKNLCYANTINWKKLFGTSGQKTKIISNRGENSCKA

SEQ ID NO: 3956 - protein, 40 aa, Artificial Sequence
  Description of Artificial Sequence: Synthetic polypeptide
GNKNLCYANTINWKKLFGTSGQKTKIISNRGENSCKATGQ

SEQ ID NO: 3957 - protein, 40 aa, Artificial Sequence
  Description of Artificial Sequence: Synthetic polypeptide
NKNLCYANTINWKKLFGTSGQKTKIISNRGENSCKATGQV

SEQ ID NO: 3958 - protein, 40 aa, Artificial Sequence
  Description of Artificial Sequence: Synthetic polypeptide
KNLCYANTINWKKLFGTSGQKTKIISNRGENSCKATGQVC

SEQ ID NO: 3959 - protein, 40 aa, Artificial Sequence
  Description of Artificial Sequence: Synthetic polypeptide
NLCYANTINWKKLFGTSGQKTKIISNRGENSCKATGQVCH

SEQ ID NO: 3960 - protein, 40 aa, Artificial Sequence
  Description of Artificial Sequence: Synthetic polypeptide
YANTINWKKLFGTSGQKTKIISNRGENSCKATGQVCHALC

SEQ ID NO: 3961 - protein, 40 aa, Artificial Sequence
  Description of Artificial Sequence: Synthetic polypeptide
ANTINWKKLFGTSGQKTKIISNRGENSCKATGQVCHALCS

SEQ ID NO: 3962 - protein, 40 aa, Artificial Sequence
  Description of Artificial Sequence: Synthetic polypeptide
NTINWKKLFGTSGQKTKIISNRGENSCKATGQVCHALCSP

SEQ ID NO: 3963 - protein, 40 aa, Artificial Sequence
  Description of Artificial Sequence: Synthetic polypeptide
EAPNQALLRILKETEFKKIKVLGSGAFGTVYKGLWIPEGE

SEQ ID NO: 3964 - protein, 40 aa, Artificial Sequence
  Description of Artificial Sequence: Synthetic polypeptide
APNQALLRILKETEFKKIKVLGSGAFGTVYKGLWIPEGEK

SEQ ID NO: 3965 - protein, 40 aa, Artificial Sequence
  Description of Artificial Sequence: Synthetic polypeptide
PNQALLRILKETEFKKIKVLGSGAFGTVYKGLWIPEGEKV

SEQ ID NO: 3966 - protein, 40 aa, Artificial Sequence
  Description of Artificial Sequence: Synthetic polypeptide
NQALLRILKETEFKKIKVLGSGAFGTVYKGLWIPEGEKVK

SEQ ID NO: 3967 - protein, 40 aa, Artificial Sequence
  Description of Artificial Sequence: Synthetic polypeptide
QALLRILKETEFKKIKVLGSGAFGTVYKGLWIPEGEKVKI

SEQ ID NO: 3968 - protein, 40 aa, Artificial Sequence
  Description of Artificial Sequence: Synthetic polypeptide
RILKETEFKKIKVLGSGAFGTVYKGLWIPEGEKVKIPVAI

SEQ ID NO: 3969 - protein, 40 aa, Artificial Sequence
  Description of Artificial Sequence: Synthetic polypeptide
MKETEFKKIKVLGSGAFGTVYKGLWIPEGEKVKIPVAIKE

SEQ ID NO: 3970 - protein, 40 aa, Artificial Sequence
  Description of Artificial Sequence: Synthetic polypeptide
KETEFKKIKVLGSGAFGTVYKGLWIPEGEKVKIPVAIKEL

SEQ ID NO: 3971 - protein, 40 aa, Artificial Sequence
  Description of Artificial Sequence: Synthetic polypeptide
ETEFKKIKVLGSGAFGTVYKGLWIPEGEKVKIPVAIKELR

SEQ ID NO: 3972 - protein, 40 aa, Artificial Sequence
  Description of Artificial Sequence: Synthetic polypeptide
EFKKIKVLGSGAFGTVYKGLWIPEGEKVKIPVAIKELREA

SEQ ID NO: 3973 - protein, 40 aa, Artificial Sequence
  Description of Artificial Sequence: Synthetic polypeptide
KVLGSGAFGTVYKGLWIPEGEKVKIPVAIKELREATSPKA

SEQ ID NO: 3974 - protein, 40 aa, Artificial Sequence
  Description of Artificial Sequence: Synthetic polypeptide
QLFEDNYALAVLDNGDPLNNTTPVTGASPGGLRELQLRSL

SEQ ID NO: 3975 - protein, 40 aa, Artificial Sequence
  Description of Artificial Sequence: Synthetic polypeptide
DNYALAVLDNGDPLNNTTPVTGASPGGLRELQLRSLTEIL

SEQ ID NO: 3976 - protein, 40 aa, Artificial Sequence
  Description of Artificial Sequence: Synthetic polypeptide
NYALAVLDNGDPLNNTTPVTGASPGGLRELQLRSLTEILK

SEQ ID NO: 3977 - protein, 40 aa, Artificial Sequence
  Description of Artificial Sequence: Synthetic polypeptide
AVLDNGDPLNNTTPVTGASPGGLRELQLRSLTEILKGGVL

SEQ ID NO: 3978 - protein, 40 aa, Artificial Sequence
  Description of Artificial Sequence: Synthetic polypeptide
VLDNGDPLNNTTPVTGASPGGLRELQLRSLTEILKGGVLI

SEQ ID NO: 3979 - protein, 40 aa, Artificial Sequence
  Description of Artificial Sequence: Synthetic polypeptide
DNGDPLNNTTPVTGASPGGLRELQLRSLTEILKGGVLIQR

SEQ ID NO: 3980 - protein, 40 aa, Artificial Sequence
  Description of Artificial Sequence: Synthetic polypeptide
NGDPLNNTTPVTGASPGGLRELQLRSLTEILKGGVLIQRN

SEQ ID NO: 3981 - protein, 40 aa, Artificial Sequence
  Description of Artificial Sequence: Synthetic polypeptide
DPLNNTTPVTGASPGGLRELQLRSLTEILKGGVLIQRNPQ

SEQ ID NO: 3982 - protein, 40 aa, Artificial Sequence
  Description of Artificial Sequence: Synthetic polypeptide
NQEVTAEDGTQRCEKCSKPCARVCYGLGMEHLREVRAVTS

SEQ ID NO: 3983 - protein, 40 aa, Artificial Sequence
  Description of Artificial Sequence: Synthetic polypeptide
RILHNGAYSLTLQGLGISWLGLRSLRELGSGLALIHHNTH

SEQ ID NO: 3984 - protein, 40 aa, Artificial Sequence
  Description of Artificial Sequence: Synthetic polypeptide
KYTMRRLLQETELVEPLTPSGAMPNQAQMRILKETELRKV

SEQ ID NO: 3985 - protein, 40 aa, Artificial Sequence
  Description of Artificial Sequence: Synthetic polypeptide
RRLLQETELVEPLTPSGAMPNQAQMRILKETELRKVKVLG

SEQ ID NO: 3986 - protein, 40 aa, Artificial Sequence
  Description of Artificial Sequence: Synthetic polypeptide
PHMHNFSVFSNLTTIGGRSLYNRGFSLLIMKNLNVTSLGF

SEQ ID NO: 3987 - protein, 40 aa, Artificial Sequence
  Description of Artificial Sequence: Synthetic polypeptide
NFSVFSNLTTIGGRSLYNRGFSLLIMKNLNVTSLGFRSLK

SEQ ID NO: 3988 - protein, 40 aa, Artificial Sequence
  Description of Artificial Sequence: Synthetic polypeptide
VFSNLTTIGGRSLYNRGFSLLIMKNLNVTSLGFRSLKEIS

SEQ ID NO: 3989 - protein, 40 aa, Artificial Sequence
  Description of Artificial Sequence: Synthetic polypeptide
VVIFMMLGGTFLYWRGRRIQNKRAMRRYLERGESIEPLDP

SEQ ID NO: 3990 - protein, 40 aa, Artificial Sequence
  Description of Artificial Sequence: Synthetic polypeptide
MMLGGTFLYWRGRRIQNKRAMRRYLERGESIEPLDPSEKA

SEQ ID NO: 3991 - protein, 40 aa, Artificial Sequence
  Description of Artificial Sequence: Synthetic polypeptide
VIKRESGPGIAPGPEPHGLTNKKLEEVELEPELDLDLDLE

SEQ ID NO: 3992 - protein, 40 aa, Artificial Sequence
  Description of Artificial Sequence: Synthetic polypeptide
RDGGGPGGDYAAMGACPASEQGYEEMRAFQGPGHQAPHVH

SEQ ID NO: 3993 - protein, 40 aa, Artificial Sequence
  Description of Artificial Sequence: Synthetic polypeptide
PGGDYAAMGACPASEQGYEEMRAFQGPGHQAPHVHYARLK

SEQ ID NO: 3994 - protein, 40 aa, Artificial Sequence
  Description of Artificial Sequence: Synthetic polypeptide
GGDYAAMGACPASEQGYEEMRAFQGPGHQAPHVHYARLKT

SEQ ID NO: 3995 - protein, 40 aa, Artificial Sequence
  Description of Artificial Sequence: Synthetic polypeptide
AAMGACPASEQGYEEMRAFQGPGHQAPHVHYARLKTLRSL

SEQ ID NO: 3996 - protein, 40 aa, Artificial Sequence
  Description of Artificial Sequence: Synthetic polypeptide
SEQGYEEMRAFQGPGHQAPHVHYARLKTLRSLEATDSAFD

SEQ ID NO: 3997 - protein, 40 aa, Artificial Sequence
  Description of Artificial Sequence: Synthetic polypeptide
EQGYEEMRAFQGPGHQAPHVHYARLKTLRSLEATDSAFDN

SEQ ID NO: 3998 - protein, 40 aa, Artificial Sequence
  Description of Artificial Sequence: Synthetic polypeptide
QGYEEMRAFQGPGHQAPHVHYARLKTLRSLEATDSAFDNP

SEQ ID NO: 3999 - protein, 40 aa, Artificial Sequence
  Description of Artificial Sequence: Synthetic polypeptide
TVQPSDSQSVCAGTENKLSSLSDLEQQYRALRKYYENCEV

SEQ ID NO: 4000 - protein, 40 aa, Artificial Sequence
  Description of Artificial Sequence: Synthetic polypeptide
VLVALNQFRYLPLENLRIIRGTKLYEDRYALAIFLNYRKD

SEQ ID NO: 4001 - protein, 40 aa, Artificial Sequence
  Description of Artificial Sequence: Synthetic polypeptide
LVALNQFRYLPLENLRIIRGTKLYEDRYALAIFLNYRKDG

SEQ ID NO: 4002 - protein, 40 aa, Artificial Sequence
  Description of Artificial Sequence: Synthetic polypeptide
ALNQFRYLPLENLRIIRGTKLYEDRYALAIFLNYRKDGNF

SEQ ID NO: 4003 - protein, 40 aa, Artificial Sequence
  Description of Artificial Sequence: Synthetic polypeptide
ENLRIIRGTKLYEDRYALAIFLNYRKDGNFGLQELGLKNL

SEQ ID NO: 4004 - protein, 40 aa, Artificial Sequence
  Description of Artificial Sequence: Synthetic polypeptide
NLRIIRGTKLYEDRYALAIFLNYRKDGNFGLQELGLKNLT

SEQ ID NO: 4005 - protein, 40 aa, Artificial Sequence
  Description of Artificial Sequence: Synthetic polypeptide
RIIRGTKLYEDRYALAIFLNYRKDGNFGLQELGLKNLTEI

SEQ ID NO: 4006 - protein, 40 aa, Artificial Sequence
  Description of Artificial Sequence: Synthetic polypeptide
IIRGTKLYEDRYALAIFLNYRKDGNFGLQELGLKNLTEIL

SEQ ID NO: 4007 - protein, 40 aa, Artificial Sequence
  Description of Artificial Sequence: Synthetic polypeptide
IRGTKLYEDRYALAIFLNYRKDGNFGLQELGLKNLTEILN

SEQ ID NO: 4008 - protein, 40 aa, Artificial Sequence
  Description of Artificial Sequence: Synthetic polypeptide
RGTKLYEDRYALAIFLNYRKDGNFGLQELGLKNLTEILNG

SEQ ID NO: 4009 - protein, 40 aa, Artificial Sequence
  Description of Artificial Sequence: Synthetic polypeptide
GTKLYEDRYALAIFLNYRKDGNFGLQELGLKNLTEILNGG

SEQ ID NO: 4010 - protein, 40 aa, Artificial Sequence
  Description of Artificial Sequence: Synthetic polypeptide
KLYEDRYALAIFLNYRKDGNFGLQELGLKNLTEILNGGVY

SEQ ID NO: 4011 - protein, 40 aa, Artificial Sequence
  Description of Artificial Sequence: Synthetic polypeptide
LYEDRYALAIFLNYRKDGNFGLQELGLKNLTEILNGGVYV

SEQ ID NO: 4012 - protein, 40 aa, Artificial Sequence
  Description of Artificial Sequence: Synthetic polypeptide
YEDRYALAIFLNYRKDGNFGLQELGLKNLTEILNGGVYVD

SEQ ID NO: 4013 - protein, 40 aa, Artificial Sequence
  Description of Artificial Sequence: Synthetic polypeptide
EDRYALAIFLNYRKDGNFGLQELGLKNLTEILNGGVYVDQ

SEQ ID NO: 4014 - protein, 40 aa, Artificial Sequence
  Description of Artificial Sequence: Synthetic polypeptide
DRYALAIFLNYRKDGNFGLQELGLKNLTEILNGGVYVDQN

SEQ ID NO: 4015 - protein, 40 aa, Artificial Sequence
  Description of Artificial Sequence: Synthetic polypeptide
YALAIFLNYRKDGNFGLQELGLKNLTEILNGGVYVDQNKF

SEQ ID NO: 4016 - protein, 40 aa, Artificial Sequence
  Description of Artificial Sequence: Synthetic polypeptide
AIFLNYRKDGNFGLQELGLKNLTEILNGGVYVDQNKFLCY

SEQ ID NO: 4017 - protein, 40 aa, Artificial Sequence
  Description of Artificial Sequence: Synthetic polypeptide
IFLNYRKDGNFGLQELGLKNLTEILNGGVYVDQNKFLCYA

SEQ ID NO: 4018 - protein, 40 aa, Artificial Sequence
  Description of Artificial Sequence: Synthetic polypeptide
FLNYRKDGNFGLQELGLKNLTEILNGGVYVDQNKFLCYAD

SEQ ID NO: 4019 - protein, 40 aa, Artificial Sequence
  Description of Artificial Sequence: Synthetic polypeptide
NYRKDGNFGLQELGLKNLTEILNGGVYVDQNKFLCYADTI

SEQ ID NO: 4020 - protein, 40 aa, Artificial Sequence
  Description of Artificial Sequence: Synthetic polypeptide
QHARTPLIAAGVIGGLFILVIVGLTFAVYVRRKSIKKKRA

SEQ ID NO: 4021 - protein, 40 aa, Artificial Sequence
  Description of Artificial Sequence: Synthetic polypeptide
ARTPLIAAGVIGGLFILVIVGLTFAVYVRRKSIKKKRALR

SEQ ID NO: 4022 - protein, 40 aa, Artificial Sequence
  Description of Artificial Sequence: Synthetic polypeptide
RTPLIAAGVIGGLFILVIVGLTFAVYVRRKSIKKKRALRR

SEQ ID NO: 4023 - protein, 40 aa, Artificial Sequence
  Description of Artificial Sequence: Synthetic polypeptide
TPLIAAGVIGGLFILVIVGLTFAVYVRRKSIKKKRALRRF

SEQ ID NO: 4024 - protein, 40 aa, Artificial Sequence
  Description of Artificial Sequence: Synthetic polypeptide
PLIAAGVIGGLFILVIVGLTFAVYVRRKSIKKKRALRRFL

SEQ ID NO: 4025 - protein, 40 aa, Artificial Sequence
  Description of Artificial Sequence: Synthetic polypeptide
IAAGVIGGLFILVIVGLTFAVYVRRKSIKKKRALRRFLET

SEQ ID NO: 4026 - protein, 40 aa, Artificial Sequence
  Description of Artificial Sequence: Synthetic polypeptide
GVIGGLFILVIVGLTFAVYVRRKSIKKKRALRRFLETELV

SEQ ID NO: 4027 - protein, 40 aa, Artificial Sequence
  Description of Artificial Sequence: Synthetic polypeptide
VIGGLFILVIVGLTFAVYVRRKSIKKKRALRRFLETELVE

SEQ ID NO: 4028 - protein, 40 aa, Artificial Sequence
  Description of Artificial Sequence: Synthetic polypeptide
VIVGLTFAVYVRRKSIKKKRALRRFLETELVEPLTPSGTA

SEQ ID NO: 4029 - protein, 40 aa, Artificial Sequence
  Description of Artificial Sequence: Synthetic polypeptide
VGLTFAVYVRRKSIKKKRALRRFLETELVEPLTPSGTAPN

SEQ ID NO: 4030 - protein, 40 aa, Artificial Sequence
  Description of Artificial Sequence: Synthetic polypeptide
IKKKRALRRFLETELVEPLTPSGTAPNQAQLRILKETELK

SEQ ID NO: 4031 - protein, 40 aa, Artificial Sequence
  Description of Artificial Sequence: Synthetic polypeptide
KKKRALRRFLETELVEPLTPSGTAPNQAQLRILKETELKR

SEQ ID NO: 4032 - protein, 40 aa, Artificial Sequence
  Description of Artificial Sequence: Synthetic polypeptide
KKRALRRFLETELVEPLTPSGTAPNQAQLRILKETELKRV

SEQ ID NO: 4033 - protein, 40 aa, Artificial Sequence
  Description of Artificial Sequence: Synthetic polypeptide
KRALRRFLETELVEPLTPSGTAPNQAQLRILKETELKRVK

SEQ ID NO: 4034 - protein, 40 aa, Artificial Sequence
  Description of Artificial Sequence: Synthetic polypeptide
LTPSGTAPNQAQLRILKETELKRVKVLGSGAFGTVYKGIW

SEQ ID NO: 4035 - protein, 40 aa, Artificial Sequence
  Description of Artificial Sequence: Synthetic polypeptide
APNQAQLRILKETELKRVKVLGSGAFGTVYKGIWVPEGET

SEQ ID NO: 4036 - protein, 40 aa, Artificial Sequence
  Description of Artificial Sequence: Synthetic polypeptide
NQAQLRILKETELKRVKVLGSGAFGTVYKGIWVPEGETVK

SEQ ID NO: 4037 - protein, 40 aa, Artificial Sequence
  Description of Artificial Sequence: Synthetic polypeptide
QAQLRILKETELKRVKVLGSGAFGTVYKGIWVPEGETVKI

SEQ ID NO: 4038 - protein, 40 aa, Artificial Sequence
  Description of Artificial Sequence: Synthetic polypeptide
QLRILKETELKRVKVLGSGAFGTVYKGIWVPEGETVKIPV

SEQ ID NO: 4039 - protein, 40 aa, Artificial Sequence
  Description of Artificial Sequence: Synthetic polypeptide
LRILKETELKRVKVLGSGAFGTVYKGIWVPEGETVKIPVA

SEQ ID NO: 4040 - protein, 40 aa, Artificial Sequence
  Description of Artificial Sequence: Synthetic polypeptide
ILKETELKRVKVLGSGAFGTVYKGIWVPEGETVKIPVAIK

SEQ ID NO: 4041 - protein, 40 aa, Artificial Sequence
  Description of Artificial Sequence: Synthetic polypeptide
MKETELKRVKVLGSGAFGTVYKGIWVPEGETVKIPVAIKI

SEQ ID NO: 4042 - protein, 40 aa, Artificial Sequence
  Description of Artificial Sequence: Synthetic polypeptide
ETELKRVKVLGSGAFGTVYKGIWVPEGETVKIPVAIKILN

SEQ ID NO: 4043 - protein, 40 aa, Artificial Sequence
  Description of Artificial Sequence: Synthetic polypeptide
TELKRVKVLGSGAFGTVYKGIWVPEGETVKIPVAIKILNE

SEQ ID NO: 4044 - protein, 40 aa, Artificial Sequence
  Description of Artificial Sequence: Synthetic polypeptide
MKRVKVLGSGAFGTVYKGIWVPEGETVKIPVAIKILNETT

SEQ ID NO: 4045 - protein, 40 aa, Artificial Sequence
  Description of Artificial Sequence: Synthetic polypeptide
VKVLGSGAFGTVYKGIWVPEGETVKIPVAIKILNETTGPK

SEQ ID NO: 4046 - protein, 40 aa, Artificial Sequence
  Description of Artificial Sequence: Synthetic polypeptide
VLGSGAFGTVYKGIWVPEGETVKIPVAIKILNETTGPKAN

SEQ ID NO: 4047 - protein, 40 aa, Artificial Sequence
  Description of Artificial Sequence: Synthetic polypeptide
SGAFGTVYKGIWVPEGETVKIPVAIKILNETTGPKANVEF

SEQ ID NO: 4048 - protein, 40 aa, Artificial Sequence
  Description of Artificial Sequence: Synthetic polypeptide
QLSSPFYTKTTKMKRKLDHGSEVRSFSLGKKPCKVSEYTS

SEQ ID NO: 4049 - protein, 40 aa, Artificial Sequence
  Description of Artificial Sequence: Synthetic polypeptide
SSPFYTKTTKMKRKLDHGSEVRSFSLGKKPCKVSEYTSTT

SEQ ID NO: 4050 - protein, 40 aa, Artificial Sequence
  Description of Artificial Sequence: Synthetic polypeptide
SPFYTKTTKMKRKLDHGSEVRSFSLGKKPCKVSEYTSTTG

SEQ ID NO: 4051 - protein, 40 aa, Artificial Sequence
  Description of Artificial Sequence: Synthetic polypeptide
PFYTKTTKMKRKLDHGSEVRSFSLGKKPCKVSEYTSTTGL

SEQ ID NO: 4052 - protein, 40 aa, Artificial Sequence
  Description of Artificial Sequence: Synthetic polypeptide
FYTKTTKMKRKLDHGSEVRSFSLGKKPCKVSEYTSTTGLV

SEQ ID NO: 4053 - protein, 40 aa, Artificial Sequence
  Description of Artificial Sequence: Synthetic polypeptide
YTKTTKMKRKLDHGSEVRSFSLGKKPCKVSEYTSTTGLVP

SEQ ID NO: 4054 - protein, 40 aa, Artificial Sequence
  Description of Artificial Sequence: Synthetic polypeptide
RYWRILAEDNLLWREKCKEEGIDEPLHIKRRKVIKPGFIH

SEQ ID NO: 4055 - protein, 40 aa, Artificial Sequence
  Description of Artificial Sequence: Synthetic polypeptide
EDNLLWREKCKEEGIDEPLHIKRRKVIKPGFIHSPWKSAY

SEQ ID NO: 4056 - protein, 40 aa, Artificial Sequence
  Description of Artificial Sequence: Synthetic polypeptide
NLLWREKCKEEGIDEPLHIKRRKVIKPGFIHSPWKSAYIR

SEQ ID NO: 4057 - protein, 40 aa, Artificial Sequence
  Description of Artificial Sequence: Synthetic polypeptide
EEGIDEPLHIKRRKVIKPGFIHSPWKSAYIRQHRIDTNWR

SEQ ID NO: 4058 - protein, 40 aa, Artificial Sequence
  Description of Artificial Sequence: Synthetic polypeptide
YDFMVKVWDPETETCLHTLQGHTNRVYSLQFDGIHVVSGS

SEQ ID NO: 4059 - protein, 40 aa, Artificial Sequence
  Description of Artificial Sequence: Synthetic polypeptide
DFMVKVWDPETETCLHTLQGHTNRVYSLQFDGIHVVSGSL

SEQ ID NO: 4060 - protein, 40 aa, Artificial Sequence
  Description of Artificial Sequence: Synthetic polypeptide
MQGHTNRVYSLQFDGIHVVSGSLDTSIRVWDVETGNCIHT

SEQ ID NO: 4061 - protein, 40 aa, Artificial Sequence
  Description of Artificial Sequence: Synthetic polypeptide
NRVYSLQFDGIHVVSGSLDTSIRVWDVETGNCIHTLTGHQ

SEQ ID NO: 4062 - protein, 40 aa, Artificial Sequence
  Description of Artificial Sequence: Synthetic polypeptide
AGGNPMPTMRWLKNGKEFKQEHRIGGYKVRNQHWSLIMES

SEQ ID NO: 4063 - protein, 40 aa, Artificial Sequence
  Description of Artificial Sequence: Synthetic polypeptide
GNPMPTMRWLKNGKEFKQEHRIGGYKVRNQHWSLIMESVV

SEQ ID NO: 4064 - protein, 40 aa, Artificial Sequence
  Description of Artificial Sequence: Synthetic polypeptide
RWLKNGKEFKQEHRIGGYKVRNQHWSLIMESVVPSDKGNY

SEQ ID NO: 4065 - protein, 40 aa, Artificial Sequence
  Description of Artificial Sequence: Synthetic polypeptide
WLKNGKEFKQEHRIGGYKVRNQHWSLIMESVVPSDKGNYT

SEQ ID NO: 4066 - protein, 40 aa, Artificial Sequence
  Description of Artificial Sequence: Synthetic polypeptide
NGKEFKQEHRIGGYKVRNQHWSLIMESVVPSDKGNYTCVV

SEQ ID NO: 4067 - protein, 40 aa, Artificial Sequence
  Description of Artificial Sequence: Synthetic polypeptide
EVLALFNVTEADAGEYICKVSNYIGQANQSAWLTVLPKQQ

SEQ ID NO: 4068 - protein, 40 aa, Artificial Sequence
  Description of Artificial Sequence: Synthetic polypeptide
NVTEADAGEYICKVSNYIGQANQSAWLTVLPKQQAPGREK

SEQ ID NO: 4069 - protein, 40 aa, Artificial Sequence
  Description of Artificial Sequence: Synthetic polypeptide
TEADAGEYICKVSNYIGQANQSAWLTVLPKQQAPGREKEI

SEQ ID NO: 4070 - protein, 40 aa, Artificial Sequence
  Description of Artificial Sequence: Synthetic polypeptide
EYICKVSNYIGQANQSAWLTVLPKQQAPGREKEITASPDY

SEQ ID NO: 4071 - protein, 40 aa, Artificial Sequence
  Description of Artificial Sequence: Synthetic polypeptide
YICKVSNYIGQANQSAWLTVLPKQQAPGREKEITASPDYL

SEQ ID NO: 4072 - protein, 40 aa, Artificial Sequence
  Description of Artificial Sequence: Synthetic polypeptide
ICKVSNYIGQANQSAWLTVLPKQQAPGREKEITASPDYLE

SEQ ID NO: 4073 - protein, 40 aa, Artificial Sequence
  Description of Artificial Sequence: Synthetic polypeptide
CRMKNTTKKPDFSSQPAVHKLTKRIPLRRQVTVSAESSSS

SEQ ID NO: 4074 - protein, 40 aa, Artificial Sequence
  Description of Artificial Sequence: Synthetic polypeptide
KDKPKEAVTVAVKMLKDDATEKDLSDLVSEMEMMKMIGKH

SEQ ID NO: 4075 - protein, 40 aa, Artificial Sequence
  Description of Artificial Sequence: Synthetic polypeptide
GKHKNIINLLGACTQDGPLYVIVEYASKGNLREYLRARRP

SEQ ID NO: 4076 - protein, 40 aa, Artificial Sequence
  Description of Artificial Sequence: Synthetic polypeptide
RGVVSMVILKMTETQAGEYLLFIQSEATNYTILFTVSIRN

SEQ ID NO: 4077 - protein, 40 aa, Artificial Sequence
  Description of Artificial Sequence: Synthetic polypeptide
VILKMTETQAGEYLLFIQSEATNYTILFTVSIRNTLLYTL

SEQ ID NO: 4078 - protein, 40 aa, Artificial Sequence
  Description of Artificial Sequence: Synthetic polypeptide
ILKMTETQAGEYLLFIQSEATNYTILFTVSIRNTLLYTLR

SEQ ID NO: 4079 - protein, 40 aa, Artificial Sequence
  Description of Artificial Sequence: Synthetic polypeptide
KMTETQAGEYLLFIQSEATNYTILFTVSIRNTLLYTLRRP

SEQ ID NO: 4080 - protein, 40 aa, Artificial Sequence
  Description of Artificial Sequence: Synthetic polypeptide
MTETQAGEYLLFIQSEATNYTILFTVSIRNTLLYTLRRPY

SEQ ID NO: 4081 - protein, 40 aa, Artificial Sequence
  Description of Artificial Sequence: Synthetic polypeptide
TETQAGEYLLFIQSEATNYTILFTVSIRNTLLYTLRRPYF

SEQ ID NO: 4082 - protein, 40 aa, Artificial Sequence
  Description of Artificial Sequence: Synthetic polypeptide
ETQAGEYLLFIQSEATNYTILFTVSIRNTLLYTLRRPYFR

SEQ ID NO: 4083 - protein, 40 aa, Artificial Sequence
  Description of Artificial Sequence: Synthetic polypeptide
TQAGEYLLFIQSEATNYTILFTVSIRNTLLYTLRRPYFRK

SEQ ID NO: 4084 - protein, 40 aa, Artificial Sequence
  Description of Artificial Sequence: Synthetic polypeptide
QAGEYLLFIQSEATNYTILFTVSIRNTLLYTLRRPYFRKM

SEQ ID NO: 4085 - protein, 40 aa, Artificial Sequence
  Description of Artificial Sequence: Synthetic polypeptide
LFIQSEATNYTILFTVSIRNTLLYTLRRPYFRKMENQDAL

SEQ ID NO: 4086 - protein, 40 aa, Artificial Sequence
  Description of Artificial Sequence: Synthetic polypeptide
RNTLLYTLRRPYFRKMENQDALVCISESVPEPIVEWVLCD

SEQ ID NO: 4087 - protein, 40 aa, Artificial Sequence
  Description of Artificial Sequence: Synthetic polypeptide
TLLYTLRRPYFRKMENQDALVCISESVPEPIVEWVLCDSQ

SEQ ID NO: 4088 - protein, 40 aa, Artificial Sequence
  Description of Artificial Sequence: Synthetic polypeptide
LYTLRRPYFRKMENQDALVCISESVPEPIVEWVLCDSQGE

SEQ ID NO: 4089 - protein, 40 aa, Artificial Sequence
  Description of Artificial Sequence: Synthetic polypeptide
TLRRPYFRKMENQDALVCISESVPEPIVEWVLCDSQGESC

SEQ ID NO: 4090 - protein, 40 aa, Artificial Sequence
  Description of Artificial Sequence: Synthetic polypeptide
YFRKMENQDALVCISESVPEPIVEWVLCDSQGESCKEESP

SEQ ID NO: 4091 - protein, 40 aa, Artificial Sequence
  Description of Artificial Sequence: Synthetic polypeptide
RKMENQDALVCISESVPEPIVEWVLCDSQGESCKEESPAV

SEQ ID NO: 4092 - protein, 40 aa, Artificial Sequence
  Description of Artificial Sequence: Synthetic polypeptide
ENQDALVCISESVPEPIVEWVLCDSQGESCKEESPAVVKK

SEQ ID NO: 4093 - protein, 40 aa, Artificial Sequence
  Description of Artificial Sequence: Synthetic polypeptide
ASASQASCFSDGYPLPSWTWKKCSDKSPNCTEEITEGVWN

SEQ ID NO: 4094 - protein, 40 aa, Artificial Sequence
  Description of Artificial Sequence: Synthetic polypeptide
LNSPGPFPFIQDNISFYATIGVCLLFIVVLTLLICHKYKK

SEQ ID NO: 4095 - protein, 40 aa, Artificial Sequence
  Description of Artificial Sequence: Synthetic polypeptide
FPFIQDNISFYATIGVCLLFIVVLTLLICHKYKKQFRYES

SEQ ID NO: 4096 - protein, 40 aa, Artificial Sequence
  Description of Artificial Sequence: Synthetic polypeptide
QFRYESQLQMVQVTGSSDNEYFYVDFREYEYDLKWEFPRE

SEQ ID NO: 4097 - protein, 40 aa, Artificial Sequence
  Description of Artificial Sequence: Synthetic polypeptide
LQMVQVTGSSDNEYFYVDFREYEYDLKWEFPRENLEFGKV

SEQ ID NO: 4098 - protein, 40 aa, Artificial Sequence
  Description of Artificial Sequence: Synthetic polypeptide
QMVQVTGSSDNEYFYVDFREYEYDLKWEFPRENLEFGKVL

SEQ ID NO: 4099 - protein, 40 aa, Artificial Sequence
  Description of Artificial Sequence: Synthetic polypeptide
YVDFREYEYDLKWEFPRENLEFGKVLGSGAFGKVMNATAY

SEQ ID NO: 4100 - protein, 40 aa, Artificial Sequence
  Description of Artificial Sequence: Synthetic polypeptide
VDFREYEYDLKWEFPRENLEFGKVLGSGAFGKVMNATAYG

SEQ ID NO: 4101 - protein, 40 aa, Artificial Sequence
  Description of Artificial Sequence: Synthetic polypeptide
REYEYDLKWEFPRENLEFGKVLGSGAFGKVMNATAYGISK

SEQ ID NO: 4102 - protein, 40 aa, Artificial Sequence
  Description of Artificial Sequence: Synthetic polypeptide
EYEYDLKWEFPRENLEFGKVLGSGAFGKVMNATAYGISKT

SEQ ID NO: 4103 - protein, 40 aa, Artificial Sequence
  Description of Artificial Sequence: Synthetic polypeptide
EYDLKWEFPRENLEFGKVLGSGAFGKVMNATAYGISKTGV

SEQ ID NO: 4104 - protein, 40 aa, Artificial Sequence
  Description of Artificial Sequence: Synthetic polypeptide
YDLKWEFPRENLEFGKVLGSGAFGKVMNATAYGISKTGVS

SEQ ID NO: 4105 - protein, 40 aa, Artificial Sequence
  Description of Artificial Sequence: Synthetic polypeptide
HENIVNLLGACTLSGPIYLIFEYCCYGDLLNYLRSKREKF

SEQ ID NO: 4106 - protein, 40 aa, Artificial Sequence
  Description of Artificial Sequence: Synthetic polypeptide
NIVNLLGACTLSGPIYLIFEYCCYGDLLNYLRSKREKFHR

SEQ ID NO: 4107 - protein, 40 aa, Artificial Sequence
  Description of Artificial Sequence: Synthetic polypeptide
DEVKESKRINAEIEKQLRRDKRDARRELKLLLLGTGESGK

SEQ ID NO: 4108 - protein, 40 aa, Artificial Sequence
  Description of Artificial Sequence: Synthetic polypeptide
PDFVGFEIPDKFVVGYALDYNEYFRDLNHVCVISETGKAK

SEQ ID NO: 4109 - protein, 40 aa, Artificial Sequence
  Description of Artificial Sequence: Synthetic polypeptide
VVEMQGDEMTRIIWELIKEKLIFPYVELDLHSYDLGIENR

SEQ ID NO: 4110 - protein, 40 aa, Artificial Sequence
  Description of Artificial Sequence: Synthetic polypeptide
YLRVVRSLCRASGSRPAWAPAALTAPTSQEQPRRHYADKR

SEQ ID NO: 4111 - protein, 40 aa, Artificial Sequence
  Description of Artificial Sequence: Synthetic polypeptide
LCRASGSRPAWAPAALTAPTSQEQPRRHYADKRIKVAKPV

SEQ ID NO: 4112 - protein, 40 aa, Artificial Sequence
  Description of Artificial Sequence: Synthetic polypeptide
PRPSGAGACCRFLPLQSQCPEGAGDAVMYASTECKAEVTP

SEQ ID NO: 4113 - protein, 40 aa, Artificial Sequence
  Description of Artificial Sequence: Synthetic polypeptide
RGARGAWDFLCVLLLLLRVQTGSSQPSVSPGEPSPPSIHP

SEQ ID NO: 4114 - protein, 40 aa, Artificial Sequence
  Description of Artificial Sequence: Synthetic polypeptide
LIVRVGDEIRLLCTDPGFVKWTFEILDETNENKQNEWITE

SEQ ID NO: 4115 - protein, 40 aa, Artificial Sequence
  Description of Artificial Sequence: Synthetic polypeptide
AFPKPEHQQWIYMNRTFTDKWEDYPKSENESNIRYVSELH

SEQ ID NO: 4116 - protein, 40 aa, Artificial Sequence
  Description of Artificial Sequence: Synthetic polypeptide
FPKPEHQQWIYMNRTFTDKWEDYPKSENESNIRYVSELHL

SEQ ID NO: 4117 - protein, 40 aa, Artificial Sequence
  Description of Artificial Sequence: Synthetic polypeptide
PEHQQWIYMNRTFTDKWEDYPKSENESNIRYVSELHLTRL

SEQ ID NO: 4118 - protein, 40 aa, Artificial Sequence
  Description of Artificial Sequence: Synthetic polypeptide
TFTDKWEDYPKSENESNIRYVSELHLTRLKGTEGGTYTFL

SEQ ID NO: 4119 - protein, 40 aa, Artificial Sequence
  Description of Artificial Sequence: Synthetic polypeptide
RLKGTEGGTYTFLVSNSDVNAAIAFNVYVNTKPEILTYDR

SEQ ID NO: 4120 - protein, 40 aa, Artificial Sequence
  Description of Artificial Sequence: Synthetic polypeptide
MPVDVQTLNSSGPPFGKLVVQSSIDSSAFKHNGTVECKAY

SEQ ID NO: 4121 - protein, 40 aa, Artificial Sequence
  Description of Artificial Sequence: Synthetic polypeptide
SSGPPFGKLVVQSSIDSSAFKHNGTVECKAYNDVGKTSAY

SEQ ID NO: 4122 - protein, 40 aa, Artificial Sequence
  Description of Artificial Sequence: Synthetic polypeptide
SGPPFGKLVVQSSIDSSAFKHNGTVECKAYNDVGKTSAYF

SEQ ID NO: 4123 - protein, 40 aa, Artificial Sequence
  Description of Artificial Sequence: Synthetic polypeptide
ITEYCCYGDLLNFLRRKRDSFICSKQEDHAEAALYKNLLH

SEQ ID NO: 4124 - protein, 40 aa, Artificial Sequence
  Description of Artificial Sequence: Synthetic polypeptide
CYGDLLNFLRRKRDSFICSKQEDHAEAALYKNLLHSKESS

SEQ ID NO: 4125 - protein, 40 aa, Artificial Sequence
  Description of Artificial Sequence: Synthetic polypeptide
AALYKNLLHSKESSCSDSTNEYMDMKPGVSYVVPTKADKR

SEQ ID NO: 4126 - protein, 40 aa, Artificial Sequence
  Description of Artificial Sequence: Synthetic polypeptide
MHSKESSCSDSTNEYMDMKPGVSYVVPTKADKRRSVRIGS

SEQ ID NO: 4127 - protein, 40 aa, Artificial Sequence
  Description of Artificial Sequence: Synthetic polypeptide
DSTNEYMDMKPGVSYVVPTKADKRRSVRIGSYIERDVTPA

SEQ ID NO: 4128 - protein, 40 aa, Artificial Sequence
  Description of Artificial Sequence: Synthetic polypeptide
YSAMRDQYMRTGEGFLCVFAINNTKSFEDIHHYREQIKRV

SEQ ID NO: 4129 - protein, 40 aa, Artificial Sequence
  Description of Artificial Sequence: Synthetic polypeptide
SAMRDQYMRTGEGFLCVFAINNTKSFEDIHHYREQIKRVK

SEQ ID NO: 4130 - protein, 40 aa, Artificial Sequence
  Description of Artificial Sequence: Synthetic polypeptide
AMRDQYMRTGEGFLCVFAINNTKSFEDIHHYREQIKRVKD

SEQ ID NO: 4131 - protein, 40 aa, Artificial Sequence
  Description of Artificial Sequence: Synthetic polypeptide
MRDQYMRTGEGFLCVFAINNTKSFEDIHHYREQIKRVKDS

SEQ ID NO: 4132 - protein, 40 aa, Artificial Sequence
  Description of Artificial Sequence: Synthetic polypeptide
RDQYMRTGEGFLCVFAINNTKSFEDIHHYREQIKRVKDSE

SEQ ID NO: 4133 - protein, 40 aa, Artificial Sequence
  Description of Artificial Sequence: Synthetic polypeptide
DQYMRTGEGFLCVFAINNTKSFEDIHHYREQIKRVKDSED

SEQ ID NO: 4134 - protein, 40 aa, Artificial Sequence
  Description of Artificial Sequence: Synthetic polypeptide
QYMRTGEGFLCVFAINNTKSFEDIHHYREQIKRVKDSEDV

SEQ ID NO: 4135 - protein, 40 aa, Artificial Sequence
  Description of Artificial Sequence: Synthetic polypeptide
RTGEGFLCVFAINNTKSFEDIHHYREQIKRVKDSEDVPMV

SEQ ID NO: 4136 - protein, 40 aa, Artificial Sequence
  Description of Artificial Sequence: Synthetic polypeptide
GFLCVFAINNTKSFEDIHHYREQIKRVKDSEDVPMVLVGN

SEQ ID NO: 4137 - protein, 40 aa, Artificial Sequence
  Description of Artificial Sequence: Synthetic polypeptide
FLCVFAINNTKSFEDIHHYREQIKRVKDSEDVPMVLVGNK

SEQ ID NO: 4138 - protein, 40 aa, Artificial Sequence
  Description of Artificial Sequence: Synthetic polypeptide
LCVFAINNTKSFEDIHHYREQIKRVKDSEDVPMVLVGNKC

SEQ ID NO: 4139 - protein, 40 aa, Artificial Sequence
  Description of Artificial Sequence: Synthetic polypeptide
CVFAINNTKSFEDIHHYREQIKRVKDSEDVPMVLVGNKCD

SEQ ID NO: 4140 - protein, 40 aa, Artificial Sequence
  Description of Artificial Sequence: Synthetic polypeptide
VFAINNTKSFEDIHHYREQIKRVKDSEDVPMVLVGNKCDL

SEQ ID NO: 4141 - protein, 40 aa, Artificial Sequence
  Description of Artificial Sequence: Synthetic polypeptide
FAINNTKSFEDIHHYREQIKRVKDSEDVPMVLVGNKCDLP

SEQ ID NO: 4142 - protein, 40 aa, Artificial Sequence
  Description of Artificial Sequence: Synthetic polypeptide
AINNTKSFEDIHHYREQIKRVKDSEDVPMVLVGNKCDLPS

SEQ ID NO: 4143 - protein, 40 aa, Artificial Sequence
  Description of Artificial Sequence: Synthetic polypeptide
SYGIPFIETSAKTRQGVDDAFYTLVREIRKHKEKMSKDGK

SEQ ID NO: 4144 - protein, 40 aa, Artificial Sequence
  Description of Artificial Sequence: Synthetic polypeptide
PFIETSAKTRQRVEDAFYTLVREIRQYRLKKISKEEKTPG

SEQ ID NO: 4145 - protein, 40 aa, Artificial Sequence
  Description of Artificial Sequence: Synthetic polypeptide
PFIETSAKTRQGVDDAFYTLVREIRKHKEKMSKDGKKKKK

SEQ ID NO: 4146 - protein, 40 aa, Artificial Sequence
  Description of Artificial Sequence: Synthetic polypeptide
IETSAKTRQGVDDAFYTLVREIRKHKEKMSKDGKKKKKKS

SEQ ID NO: 4147 - protein, 40 aa, Artificial Sequence
  Description of Artificial Sequence: Synthetic polypeptide
ETSAKTRQRVEDAFYTLVREIRQYRLKKISKEEKTPGCVK

SEQ ID NO: 4148 - protein, 40 aa, Artificial Sequence
  Description of Artificial Sequence: Synthetic polypeptide
TSAKTRQGVDDAFYTLVREIRKHKEKMSKDGKKKKKKSKT

SEQ ID NO: 4149 - protein, 40 aa, Artificial Sequence
  Description of Artificial Sequence: Synthetic polypeptide
SAKTRQRVEDAFYTLVREIRQYRLKKISKEEKTPGCVKIK

SEQ ID NO: 4150 - protein, 40 aa, Artificial Sequence
  Description of Artificial Sequence: Synthetic polypeptide
AKTRQRVEDAFYTLVREIRQYRLKKISKEEKTPGCVKIKK

SEQ ID NO: 4151 - protein, 40 aa, Artificial Sequence
  Description of Artificial Sequence: Synthetic polypeptide
KTRQRVEDAFYTLVREIRQYRLKKISKEEKTPGCVKIKKC

SEQ ID NO: 4152 - protein, 40 aa, Artificial Sequence
  Description of Artificial Sequence: Synthetic polypeptide
KTRQGVDDAFYTLVREIRKHKEKMSKDGKKKKKKSKTKCV

SEQ ID NO: 4153 - protein, 40 aa, Artificial Sequence
  Description of Artificial Sequence: Synthetic polypeptide
TRQGVDDAFYTLVREIRKHKEKMSKDGKKKKKKSKTKCVI

SEQ ID NO: 4154 - protein, 40 aa, Artificial Sequence
  Description of Artificial Sequence: Synthetic polypeptide
RQRVEDAFYTLVREIRQYRLKKISKEEKTPGCVKIKKCII

SEQ ID NO: 4155 - protein, 40 aa, Artificial Sequence
  Description of Artificial Sequence: Synthetic polypeptide
RQGVDDAFYTLVREIRKHKEKMSKDGKKKKKKSKTKCVIM

SEQ ID NO: 4156 - protein, 40 aa, Artificial Sequence
  Description of Artificial Sequence: Synthetic polypeptide
QRVEDAFYTLVREIRQYRLKKISKEEKTPGCVKIKKCIIM

SEQ ID NO: 4157 - protein, 39 aa, Artificial Sequence
  Description of Artificial Sequence: Synthetic polypeptide
QGVDDAFYTLVREIRKHKEKMSKDGKKKKKKSKTKCVIM

SEQ ID NO: 4158 - protein, 39 aa, Artificial Sequence
  Description of Artificial Sequence: Synthetic polypeptide
RVEDAFYTLVREIRQYRLKKISKEEKTPGCVKIKKCIIM

SEQ ID NO: 4159 - protein, 40 aa, Artificial Sequence
  Description of Artificial Sequence: Synthetic polypeptide
TEYKLVVVGACGVGKSALTIQLIQNHFVDEYDPTIEDSYR

SEQ ID NO: 4160 - protein, 40 aa, Artificial Sequence
  Description of Artificial Sequence: Synthetic polypeptide
VVGASGVGKSALTIQLIQNHFVDEYDPTIEDSYRKQVVID

SEQ ID NO: 4161 - protein, 40 aa, Artificial Sequence
  Description of Artificial Sequence: Synthetic polypeptide
QNHFVDEYDPTIEDSYRKQVVIDGETCLLDILDTAGKEEY

SEQ ID NO: 4162 - protein, 40 aa, Artificial Sequence; identical to SEQ ID NO: 2713
  Description of Artificial Sequence: Synthetic polypeptide

SEQ ID NO: 4163 - protein, 40 aa, Artificial Sequence; identical to SEQ ID NO: 1015
  Description of Artificial Sequence: Synthetic polypeptide

SEQ ID NO: 4164 - protein, 40 aa, Artificial Sequence; identical to SEQ ID NO: 1192
  Description of Artificial Sequence: Synthetic polypeptide

SEQ ID NO: 4165 - protein, 40 aa, Artificial Sequence; identical to SEQ ID NO: 1017
  Description of Artificial Sequence: Synthetic polypeptide

SEQ ID NO: 4166 - protein, 40 aa, Artificial Sequence; identical to SEQ ID NO: 1018
  Description of Artificial Sequence: Synthetic polypeptide

SEQ ID NO: 4167 - protein, 40 aa, Artificial Sequence
  Description of Artificial Sequence: Synthetic polypeptide
AGKEEYSAMRDQYMRTGEGFLCVFAINNTKSFEDIHHYRE

SEQ ID NO: 4168 - protein, 40 aa, Artificial Sequence
  Description of Artificial Sequence: Synthetic polypeptide
PKKKPTPIQLNPAPDGSAVNGTSSAETNLEALQKKLEELE

SEQ ID NO: 4169 - protein, 40 aa, Artificial Sequence
  Description of Artificial Sequence: Synthetic polypeptide
TSSAETNLEALQKKLEELELDEQQRKRLEAFLTQKQKVGE

SEQ ID NO: 4170 - protein, 40 aa, Artificial Sequence
  Description of Artificial Sequence: Synthetic polypeptide
MHECNSPYIVGFYGAFYSDGEISICMEHMDGGSLDQVLKK

SEQ ID NO: 4171 - protein, 40 aa, Artificial Sequence
  Description of Artificial Sequence: Synthetic polypeptide
CMEHMDGGSLDQVLKKAGRIPEQILGKVSIAVIKGLTYLR

SEQ ID NO: 4172 - protein, 40 aa, Artificial Sequence
  Description of Artificial Sequence: Synthetic polypeptide
AIFELLDYIVNEPPPKLPSGVFSLEFQDFVNKCLIKNPAE

SEQ ID NO: 4173 - protein, 40 aa, Artificial Sequence
  Description of Artificial Sequence: Synthetic polypeptide
IFELLDYIVNEPPPKLPSGVFSLEFQDFVNKCLIKNPAER

SEQ ID NO: 4174 - protein, 40 aa, Artificial Sequence
  Description of Artificial Sequence: Synthetic polypeptide
ELLDYIVNEPPPKLPSGVFSLEFQDFVNKCLIKNPAERAD

SEQ ID NO: 4175 - protein, 40 aa, Artificial Sequence
  Description of Artificial Sequence: Synthetic polypeptide
MLDYIVNEPPPKLPSGVFSLEFQDFVNKCLIKNPAERADL

SEQ ID NO: 4176 - protein, 40 aa, Artificial Sequence
  Description of Artificial Sequence: Synthetic polypeptide
YIVNEPPPKLPSGVFSLEFQDFVNKCLIKNPAERADLKQL

SEQ ID NO: 4177 - protein, 40 aa, Artificial Sequence
  Description of Artificial Sequence: Synthetic polypeptide
PKLPSGVFSLEFQDFVNKCLIKNPAERADLKQLMVHAFIK

SEQ ID NO: 4178 - protein, 40 aa, Artificial Sequence
  Description of Artificial Sequence: Synthetic polypeptide
MPSGVFSLEFQDFVNKCLIKNPAERADLKQLMVHAFIKRS

SEQ ID NO: 4179 - protein, 40 aa, Artificial Sequence
  Description of Artificial Sequence: Synthetic polypeptide
SGVFSLEFQDFVNKCLIKNPAERADLKQLMVHAFIKRSDA

SEQ ID NO: 4180 - protein, 40 aa, Artificial Sequence
  Description of Artificial Sequence: Synthetic polypeptide
EFQDFVNKCLIKNPAERADLKQLMVHAFIKRSDAEEVDFA

SEQ ID NO: 4181 - protein, 40 aa, Artificial Sequence
  Description of Artificial Sequence: Synthetic polypeptide
SQIPASEQETLVRPKPLLLKLLKSVGAQKDTYTMKEVLFY

SEQ ID NO: 4182 - protein, 40 aa, Artificial Sequence
  Description of Artificial Sequence: Synthetic polypeptide
PASEQETLVRPKPLLLKLLKSVGAQKDTYTMKEVLFYLGQ

SEQ ID NO: 4183 - protein, 40 aa, Artificial Sequence
  Description of Artificial Sequence: Synthetic polypeptide
ASEQETLVRPKPLLLKLLKSVGAQKDTYTMKEVLFYLGQY

SEQ ID NO: 4184 - protein, 40 aa, Artificial Sequence
  Description of Artificial Sequence: Synthetic polypeptide
SEQETLVRPKPLLLKLLKSVGAQKDTYTMKEVLFYLGQYI

SEQ ID NO: 4185 - protein, 40 aa, Artificial Sequence
  Description of Artificial Sequence: Synthetic polypeptide
EQETLVRPKPLLLKLLKSVGAQKDTYTMKEVLFYLGQYIM

SEQ ID NO: 4186 - protein, 40 aa, Artificial Sequence
  Description of Artificial Sequence: Synthetic polypeptide
TLVRPKPLLLKLLKSVGAQKDTYTMKEVLFYLGQYIMTKR

SEQ ID NO: 4187 - protein, 40 aa, Artificial Sequence
  Description of Artificial Sequence: Synthetic polypeptide
RPKPLLLKLLKSVGAQKDTYTMKEVLFYLGQYIMTKRLYD

SEQ ID NO: 4188 - protein, 40 aa, Artificial Sequence
  Description of Artificial Sequence: Synthetic polypeptide
KPLLLKLLKSVGAQKDTYTMKEVLFYLGQYIMTKRLYDEK

SEQ ID NO: 4189 - protein, 40 aa, Artificial Sequence
  Description of Artificial Sequence: Synthetic polypeptide
PLLLKLLKSVGAQKDTYTMKEVLFYLGQYIMTKRLYDEKQ

SEQ ID NO: 4190 - protein, 40 aa, Artificial Sequence
  Description of Artificial Sequence: Synthetic polypeptide
MLLKLLKSVGAQKDTYTMKEVLFYLGQYIMTKRLYDEKQQ

SEQ ID NO: 4191 - protein, 40 aa, Artificial Sequence
  Description of Artificial Sequence: Synthetic polypeptide
MKLLKSVGAQKDTYTMKEVLFYLGQYIMTKRLYDEKQQHI

SEQ ID NO: 4192 - protein, 40 aa, Artificial Sequence
  Description of Artificial Sequence: Synthetic polypeptide
KLLKSVGAQKDTYTMKEVLFYLGQYIMTKRLYDEKQQHIV

SEQ ID NO: 4193 - protein, 40 aa, Artificial Sequence
  Description of Artificial Sequence: Synthetic polypeptide
LLKSVGAQKDTYTMKEVLFYLGQYIMTKRLYDEKQQHIVY

SEQ ID NO: 4194 - protein, 40 aa, Artificial Sequence
  Description of Artificial Sequence: Synthetic polypeptide
LKSVGAQKDTYTMKEVLFYLGQYIMTKRLYDEKQQHIVYC

SEQ ID NO: 4195 - protein, 40 aa, Artificial Sequence
  Description of Artificial Sequence: Synthetic polypeptide
KSVGAQKDTYTMKEVLFYLGQYIMTKRLYDEKQQHIVYCS

SEQ ID NO: 4196 - protein, 40 aa, Artificial Sequence
  Description of Artificial Sequence: Synthetic polypeptide
QKDTYTMKEVLFYLGQYIMTKRLYDEKQQHIVYCSNDLLG

SEQ ID NO: 4197 - protein, 40 aa, Artificial Sequence
  Description of Artificial Sequence: Synthetic polypeptide
KDTYTMKEVLFYLGQYIMTKRLYDEKQQHIVYCSNDLLGD

SEQ ID NO: 4198 - protein, 40 aa, Artificial Sequence
  Description of Artificial Sequence: Synthetic polypeptide
DTYTMKEVLFYLGQYIMTKRLYDEKQQHIVYCSNDLLGDL

SEQ ID NO: 4199 - protein, 40 aa, Artificial Sequence
  Description of Artificial Sequence: Synthetic polypeptide
TMKEVLFYLGQYIMTKRLYDEKQQHIVYCSNDLLGDLFGV

SEQ ID NO: 4200 - protein, 40 aa, Artificial Sequence
  Description of Artificial Sequence: Synthetic polypeptide
MKEVLFYLGQYIMTKRLYDEKQQHIVYCSNDLLGDLFGVP

SEQ ID NO: 4201 - protein, 40 aa, Artificial Sequence
  Description of Artificial Sequence: Synthetic polypeptide
KEVLFYLGQYIMTKRLYDEKQQHIVYCSNDLLGDLFGVPS

SEQ ID NO: 4202 - protein, 40 aa, Artificial Sequence
  Description of Artificial Sequence: Synthetic polypeptide
EVLFYLGQYIMTKRLYDEKQQHIVYCSNDLLGDLFGVPSF

SEQ ID NO: 4203 - protein, 40 aa, Artificial Sequence
  Description of Artificial Sequence: Synthetic polypeptide
VLFYLGQYIMTKRLYDEKQQHIVYCSNDLLGDLFGVPSFS

SEQ ID NO: 4204 - protein, 40 aa, Artificial Sequence
  Description of Artificial Sequence: Synthetic polypeptide
GVPSFSVKEHRKIYTMIYRNLVVVNQQESSDSGTSVSENR

SEQ ID NO: 4205 - protein, 40 aa, Artificial Sequence
  Description of Artificial Sequence: Synthetic polypeptide
EGGSDQKDLVQELQEEKPSSSHLVSRPSTSSRRRAISETE

SEQ ID NO: 4206 - protein, 40 aa, Artificial Sequence
  Description of Artificial Sequence: Synthetic polypeptide
SLALCVIREICCERSSSSESTGTPSNPDLDAGVSEHSGDW

SEQ ID NO: 4207 - protein, 40 aa, Artificial Sequence
  Description of Artificial Sequence: Synthetic polypeptide
MCVIREICCERSSSSESTGTPSNPDLDAGVSEHSGDWLDQ

SEQ ID NO: 4208 - protein, 40 aa, Artificial Sequence
  Description of Artificial Sequence: Synthetic polypeptide
CVIREICCERSSSSESTGTPSNPDLDAGVSEHSGDWLDQD

SEQ ID NO: 4209 - protein, 40 aa, Artificial Sequence
  Description of Artificial Sequence: Synthetic polypeptide
IREICCERSSSSESTGTPSNPDLDAGVSEHSGDWLDQDSV

SEQ ID NO: 4210 - protein, 40 aa, Artificial Sequence
  Description of Artificial Sequence: Synthetic polypeptide
REICCERSSSSESTGTPSNPDLDAGVSEHSGDWLDQDSVS

SEQ ID NO: 4211 - protein, 40 aa, Artificial Sequence
  Description of Artificial Sequence: Synthetic polypeptide
EICCERSSSSESTGTPSNPDLDAGVSEHSGDWLDQDSVSD

SEQ ID NO: 4212 - protein, 40 aa, Artificial Sequence
  Description of Artificial Sequence: Synthetic polypeptide
GTPSNPDLDAGVSEHSGDWLDQDSVSDQFSVEFEVESLDS

SEQ ID NO: 4213 - protein, 40 aa, Artificial Sequence
  Description of Artificial Sequence: Synthetic polypeptide
TPSNPDLDAGVSEHSGDWLDQDSVSDQFSVEFEVESLDSE

SEQ ID NO: 4214 - protein, 40 aa, Artificial Sequence
  Description of Artificial Sequence: Synthetic polypeptide
PSNPDLDAGVSEHSGDWLDQDSVSDQFSVEFEVESLDSED

SEQ ID NO: 4215 - protein, 40 aa, Artificial Sequence
  Description of Artificial Sequence: Synthetic polypeptide
WLPEDKGKDKGEISEKAKLENSTQAEEGFDVPDCKKTIVN

SEQ ID NO: 4216 - protein, 40 aa, Artificial Sequence
  Description of Artificial Sequence: Synthetic polypeptide
EEGFDVPDCKKTIVNDSRESCVEENDDKITQASQSQESED

SEQ ID NO: 4217 - protein, 40 aa, Artificial Sequence
  Description of Artificial Sequence: Synthetic polypeptide
EGFDVPDCKKTIVNDSRESCVEENDDKITQASQSQESEDY

SEQ ID NO: 4218 - protein, 40 aa, Artificial Sequence
  Description of Artificial Sequence: Synthetic polypeptide
PDCKKTIVNDSRESCVEENDDKITQASQSQESEDYSQPST

SEQ ID NO: 4219 - protein, 40 aa, Artificial Sequence
  Description of Artificial Sequence: Synthetic polypeptide
DCKKTIVNDSRESCVEENDDKITQASQSQESEDYSQPSTS

SEQ ID NO: 4220 - protein, 40 aa, Artificial Sequence
  Description of Artificial Sequence: Synthetic polypeptide
CKKTIVNDSRESCVEENDDKITQASQSQESEDYSQPSTSS

SEQ ID NO: 4221 - protein, 40 aa, Artificial Sequence
  Description of Artificial Sequence: Synthetic polypeptide
AIEPCVICQGRPKNGCIVHGKTGHLMACFTCAKKLKKRNK

SEQ ID NO: 4222 - protein, 40 aa, Artificial Sequence
  Description of Artificial Sequence: Synthetic polypeptide
TSFSTSAQCSTSDSACRISPGQINQVRPKLPLLKILHAAG

SEQ ID NO: 4223 - protein, 40 aa, Artificial Sequence
  Description of Artificial Sequence: Synthetic polypeptide
CRISPGQINQVRPKLPLLKILHAAGAQGEMFTVKEVMHYL

SEQ ID NO: 4224 - protein, 40 aa, Artificial Sequence
  Description of Artificial Sequence: Synthetic polypeptide
SAEESSTSRKRTTEDDIPTLPTSEHKCIHSREDEDLIENL

SEQ ID NO: 4225 - protein, 40 aa, Artificial Sequence
  Description of Artificial Sequence: Synthetic polypeptide
WDVAGLPWWFLGNLRSNYTPRSNGSTDLQTNQDVGTAIVS

SEQ ID NO: 4226 - protein, 40 aa, Artificial Sequence
  Description of Artificial Sequence: Synthetic polypeptide
STDLQTNQDVGTAIVSDTTDDLWFLNESVSEQLGVGIKVE

SEQ ID NO: 4227 - protein, 40 aa, Artificial Sequence
  Description of Artificial Sequence: Synthetic polypeptide
MWFLNESVSEQLGVGIKVEAADTEQTSEEVGKVSDKKVIE

SEQ ID NO: 4228 - protein, 40 aa, Artificial Sequence
  Description of Artificial Sequence: Synthetic polypeptide
WFLNESVSEQLGVGIKVEAADTEQTSEEVGKVSDKKVIEV

SEQ ID NO: 4229 - protein, 40 aa, Artificial Sequence
  Description of Artificial Sequence: Synthetic polypeptide
FLNESVSEQLGVGIKVEAADTEQTSEEVGKVSDKKVIEVG

SEQ ID NO: 4230 - protein, 40 aa, Artificial Sequence
  Description of Artificial Sequence: Synthetic polypeptide
VSEQLGVGIKVEAADTEQTSEEVGKVSDKKVIEVGKNDDL

SEQ ID NO: 4231 - protein, 40 aa, Artificial Sequence
  Description of Artificial Sequence: Synthetic polypeptide
SEQLGVGIKVEAADTEQTSEEVGKVSDKKVIEVGKNDDLE

SEQ ID NO: 4232 - protein, 40 aa, Artificial Sequence
  Description of Artificial Sequence: Synthetic polypeptide
EQLGVGIKVEAADTEQTSEEVGKVSDKKVIEVGKNDDLED

SEQ ID NO: 4233 - protein, 40 aa, Artificial Sequence
  Description of Artificial Sequence: Synthetic polypeptide
QLGVGIKVEAADTEQTSEEVGKVSDKKVIEVGKNDDLEDS

SEQ ID NO: 4234 - protein, 40 aa, Artificial Sequence
  Description of Artificial Sequence: Synthetic polypeptide
GVGIKVEAADTEQTSEEVGKVSDKKVIEVGKNDDLEDSKS

SEQ ID NO: 4235 - protein, 40 aa, Artificial Sequence
  Description of Artificial Sequence: Synthetic polypeptide
VGIKVEAADTEQTSEEVGKVSDKKVIEVGKNDDLEDSKSL

SEQ ID NO: 4236 - protein, 40 aa, Artificial Sequence
  Description of Artificial Sequence: Synthetic polypeptide
DTEQTSEEVGKVSDKKVIEVGKNDDLEDSKSLSDDTDVEV

SEQ ID NO: 4237 - protein, 40 aa, Artificial Sequence
  Description of Artificial Sequence: Synthetic polypeptide
EEVGKVSDKKVIEVGKNDDLEDSKSLSDDTDVEVTSEDEW

SEQ ID NO: 4238 - protein, 40 aa, Artificial Sequence
  Description of Artificial Sequence: Synthetic polypeptide
EDSKSLSDDTDVEVTSEDEWQCTECKKFNSPSKRYCFRCW

SEQ ID NO: 4239 - protein, 40 aa, Artificial Sequence
  Description of Artificial Sequence: Synthetic polypeptide
TDVEVTSEDEWQCTECKKFNSPSKRYCFRCWALRKDWYSD

SEQ ID NO: 4240 - protein, 40 aa, Artificial Sequence
  Description of Artificial Sequence: Synthetic polypeptide
EDEWQCTECKKFNSPSKRYCFRCWALRKDWYSDCSKLTHS

SEQ ID NO: 4241 - protein, 40 aa, Artificial Sequence
  Description of Artificial Sequence: Synthetic polypeptide
EWQCTECKKFNSPSKRYCFRCWALRKDWYSDCSKLTHSLS

SEQ ID NO: 4242 - protein, 40 aa, Artificial Sequence
  Description of Artificial Sequence: Synthetic polypeptide
RCWALRKDWYSDCSKLTHSLSTSDITAIPEKENEGNDVPD

SEQ ID NO: 4243 - protein, 40 aa, Artificial Sequence
  Description of Artificial Sequence: Synthetic polypeptide
TAIPEKENEGNDVPDCRRTISAPVVRPKDAYIKKENSKLF

SEQ ID NO: 4244 - protein, 40 aa, Artificial Sequence
  Description of Artificial Sequence: Synthetic polypeptide
AIPEKENEGNDVPDCRRTISAPVVRPKDAYIKKENSKLFD

SEQ ID NO: 4245 - protein, 40 aa, Artificial Sequence
  Description of Artificial Sequence: Synthetic polypeptide
IPEKENEGNDVPDCRRTISAPVVRPKDAYIKKENSKLFDP

SEQ ID NO: 4246 - protein, 40 aa, Artificial Sequence
  Description of Artificial Sequence: Synthetic polypeptide
PEKENEGNDVPDCRRTISAPVVRPKDAYIKKENSKLFDPC

SEQ ID NO: 4247 - protein, 40 aa, Artificial Sequence
  Description of Artificial Sequence: Synthetic polypeptide
KENEGNDVPDCRRTISAPVVRPKDAYIKKENSKLFDPCNS

SEQ ID NO: 4248 - protein, 40 aa, Artificial Sequence
  Description of Artificial Sequence: Synthetic polypeptide
ENEGNDVPDCRRTISAPVVRPKDAYIKKENSKLFDPCNSV

SEQ ID NO: 4249 - protein, 40 aa, Artificial Sequence
  Description of Artificial Sequence: Synthetic polypeptide
NEGNDVPDCRRTISAPVVRPKDAYIKKENSKLFDPCNSVE

SEQ ID NO: 4250 - protein, 40 aa, Artificial Sequence
  Description of Artificial Sequence: Synthetic polypeptide
EGNDVPDCRRTISAPVVRPKDAYIKKENSKLFDPCNSVEF

SEQ ID NO: 4251 - protein, 40 aa, Artificial Sequence
  Description of Artificial Sequence: Synthetic polypeptide
GNDVPDCRRTISAPVVRPKDAYIKKENSKLFDPCNSVEFL

SEQ ID NO: 4252 - protein, 40 aa, Artificial Sequence
  Description of Artificial Sequence: Synthetic polypeptide
NDVPDCRRTISAPVVRPKDAYIKKENSKLFDPCNSVEFLD

SEQ ID NO: 4253 - protein, 40 aa, Artificial Sequence
  Description of Artificial Sequence: Synthetic polypeptide
DVPDCRRTISAPVVRPKDAYIKKENSKLFDPCNSVEFLDL

SEQ ID NO: 4254 - protein, 40 aa, Artificial Sequence
  Description of Artificial Sequence: Synthetic polypeptide
VPDCRRTISAPVVRPKDAYIKKENSKLFDPCNSVEFLDLA

SEQ ID NO: 4255 - protein, 40 aa, Artificial Sequence
  Description of Artificial Sequence: Synthetic polypeptide
RRTISAPVVRPKDAYIKKENSKLFDPCNSVEFLDLAHSSE

SEQ ID NO: 4256 - protein, 40 aa, Artificial Sequence
  Description of Artificial Sequence: Synthetic polypeptide
TISAPVVRPKDAYIKKENSKLFDPCNSVEFLDLAHSSESQ

SEQ ID NO: 4257 - protein, 40 aa, Artificial Sequence
  Description of Artificial Sequence: Synthetic polypeptide
ISAPVVRPKDAYIKKENSKLFDPCNSVEFLDLAHSSESQE

SEQ ID NO: 4258 - protein, 40 aa, Artificial Sequence
  Description of Artificial Sequence: Synthetic polypeptide
SAPVVRPKDAYIKKENSKLFDPCNSVEFLDLAHSSESQET

SEQ ID NO: 4259 - protein, 40 aa, Artificial Sequence
  Description of Artificial Sequence: Synthetic polypeptide
APVVRPKDAYIKKENSKLFDPCNSVEFLDLAHSSESQETI

SEQ ID NO: 4260 - protein, 40 aa, Artificial Sequence
  Description of Artificial Sequence: Synthetic polypeptide
PVVRPKDAYIKKENSKLFDPCNSVEFLDLAHSSESQETIS

SEQ ID NO: 4261 - protein, 40 aa, Artificial Sequence
  Description of Artificial Sequence: Synthetic polypeptide
VVRPKDAYIKKENSKLFDPCNSVEFLDLAHSSESQETISS

SEQ ID NO: 4262 - protein, 40 aa, Artificial Sequence
  Description of Artificial Sequence: Synthetic polypeptide
DAYIKKENSKLFDPCNSVEFLDLAHSSESQETISSMGEQL

SEQ ID NO: 4263 - protein, 40 aa, Artificial Sequence
  Description of Artificial Sequence: Synthetic polypeptide
VLAPGILVLLFTLVQRSNGECKEALAKSEMNVNMKYQLPN

SEQ ID NO: 4264 - protein, 40 aa, Artificial Sequence
  Description of Artificial Sequence: Synthetic polypeptide
EEPSQCPDCVVSALGAKVLSSVKDRFINFFVGNTINSSYF

SEQ ID NO: 4265 - protein, 40 aa, Artificial Sequence
  Description of Artificial Sequence: Synthetic polypeptide
CPDCVVSALGAKVLSSVKDRFINFFVGNTINSSYFPDHPL

SEQ ID NO: 4266 - protein, 40 aa, Artificial Sequence
  Description of Artificial Sequence: Synthetic polypeptide
RDSYPIKYVHAFESNNFIYFLTVQRETLDAQTFHTRIIRF

SEQ ID NO: 4267 - protein, 40 aa, Artificial Sequence
  Description of Artificial Sequence: Synthetic polypeptide
IKYVHAFESNNFIYFLTVQRETLDAQTFHTRIIRFCSINS

SEQ ID NO: 4268 - protein, 40 aa, Artificial Sequence
  Description of Artificial Sequence: Synthetic polypeptide
AFESNNFIYFLTVQRETLDAQTFHTRIIRFCSINSGLHSY

SEQ ID NO: 4269 - protein, 40 aa, Artificial Sequence
  Description of Artificial Sequence: Synthetic polypeptide
ETLDAQTFHTRIIRFCSINSGLHSYMEMPLECILTEKRKK

SEQ ID NO: 4270 - protein, 40 aa, Artificial Sequence
  Description of Artificial Sequence: Synthetic polypeptide
DAQTFHTRIIRFCSINSGLHSYMEMPLECILTEKRKKRST

SEQ ID NO: 4271 - protein, 40 aa, Artificial Sequence
  Description of Artificial Sequence: Synthetic polypeptide
MECILTEKRKKRSTKKEVFNILQAAYVSKPGAQLARQIGA

SEQ ID NO: 4272 - protein, 40 aa, Artificial Sequence
  Description of Artificial Sequence: Synthetic polypeptide
PLEGGTRLTICGWDFGFRRNNKFDLKKTRVLLGNESCTLT

SEQ ID NO: 4273 - protein, 40 aa, Artificial Sequence
  Description of Artificial Sequence: Synthetic polypeptide
EGGTRLTICGWDFGFRRNNKFDLKKTRVLLGNESCTLTLS

SEQ ID NO: 4274 - protein, 40 aa, Artificial Sequence
  Description of Artificial Sequence: Synthetic polypeptide
GGTRLTICGWDFGFRRNNKFDLKKTRVLLGNESCTLTLSE

SEQ ID NO: 4275 - protein, 40 aa, Artificial Sequence
  Description of Artificial Sequence: Synthetic polypeptide
ICGWDFGFRRNNKFDLKKTRVLLGNESCTLTLSESTMNTL

SEQ ID NO: 4276 - protein, 40 aa, Artificial Sequence
  Description of Artificial Sequence: Synthetic polypeptide
CGWDFGFRRNNKFDLKKTRVLLGNESCTLTLSESTMNTLK

SEQ ID NO: 4277 - protein, 40 aa, Artificial Sequence
  Description of Artificial Sequence: Synthetic polypeptide
WDFGFRRNNKFDLKKTRVLLGNESCTLTLSESTMNTLKCT

SEQ ID NO: 4278 - protein, 40 aa, Artificial Sequence
  Description of Artificial Sequence: Synthetic polypeptide
DFGFRRNNKFDLKKTRVLLGNESCTLTLSESTMNTLKCTV

SEQ ID NO: 4279 - protein, 40 aa, Artificial Sequence
  Description of Artificial Sequence: Synthetic polypeptide
IISNGHGTTQYSTFSYVDPVITSISPKYGPMAGGTLLTLT

SEQ ID NO: 4280 - protein, 40 aa, Artificial Sequence
  Description of Artificial Sequence: Synthetic polypeptide
KTCTLKSVSNSILECYTPAQTISTEFAVKLKIDLANRETS

SEQ ID NO: 4281 - protein, 40 aa, Artificial Sequence
  Description of Artificial Sequence: Synthetic polypeptide
LKSVSNSILECYTPAQTISTEFAVKLKIDLANRETSIFSY

SEQ ID NO: 4282 - protein, 40 aa, Artificial Sequence
  Description of Artificial Sequence: Synthetic polypeptide
SVSNSILECYTPAQTISTEFAVKLKIDLANRETSIFSYRE

SEQ ID NO: 4283 - protein, 40 aa, Artificial Sequence
  Description of Artificial Sequence: Synthetic polypeptide
AFFMLDGILSKYFDLIYVHNPVFKPFEKPVMISMGNENVL

SEQ ID NO: 4284 - protein, 40 aa, Artificial Sequence
  Description of Artificial Sequence: Synthetic polypeptide
YFDLIYVHNPVFKPFEKPVMISMGNENVLEIKGNDIDPEA

SEQ ID NO: 4285 - protein, 40 aa, Artificial Sequence
  Description of Artificial Sequence: Synthetic polypeptide
VFKPFEKPVMISMGNENVLEIKGNDIDPEAVKGEVLKVGN

SEQ ID NO: 4286 - protein, 40 aa, Artificial Sequence
  Description of Artificial Sequence: Synthetic polypeptide
VMISMGNENVLEIKGNDIDPEAVKGEVLKVGNKSCENIHL

SEQ ID NO: 4287 - protein, 40 aa, Artificial Sequence
  Description of Artificial Sequence: Synthetic polypeptide
ISMGNENVLEIKGNDIDPEAVKGEVLKVGNKSCENIHLHS

SEQ ID NO: 4288 - protein, 40 aa, Artificial Sequence
  Description of Artificial Sequence: Synthetic polypeptide
NENVLEIKGNDIDPEAVKGEVLKVGNKSCENIHLHSEAVL

SEQ ID NO: 4289 - protein, 40 aa, Artificial Sequence
  Description of Artificial Sequence: Synthetic polypeptide
ENVLEIKGNDIDPEAVKGEVLKVGNKSCENIHLHSEAVLC

SEQ ID NO: 4290 - protein, 40 aa, Artificial Sequence
  Description of Artificial Sequence: Synthetic polypeptide
VLEIKGNDIDPEAVKGEVLKVGNKSCENIHLHSEAVLCTV

SEQ ID NO: 4291 - protein, 40 aa, Artificial Sequence
  Description of Artificial Sequence: Synthetic polypeptide
MEIKGNDIDPEAVKGEVLKVGNKSCENIHLHSEAVLCTVP

SEQ ID NO: 4292 - protein, 40 aa, Artificial Sequence
  Description of Artificial Sequence: Synthetic polypeptide
VKGEVLKVGNKSCENIHLHSEAVLCTVPNDLLKLNSELNI

SEQ ID NO: 4293 - protein, 40 aa, Artificial Sequence
  Description of Artificial Sequence: Synthetic polypeptide
LSALNPELVQAVQHVVIGPSSLIVHFNEVIGRGHFGCVYH

SEQ ID NO: 4294 - protein, 40 aa, Artificial Sequence
  Description of Artificial Sequence: Synthetic polypeptide
SDVWSFGVLLWELMTRGAPPYPDVNTFDITVYLLQGRRLL

SEQ ID NO: 4295 - protein, 40 aa, Artificial Sequence
  Description of Artificial Sequence: Synthetic polypeptide
LLQPEYCPDPLYEVMLKCWHPKAEMRPSFSELVSRISAIF

SEQ ID NO: 4296 - protein, 40 aa, Artificial Sequence
  Description of Artificial Sequence: Synthetic polypeptide
ELVSRISAIFSTFIGEHYVHVNATYVNVKCVAPYPSLLSS

SEQ ID NO: 4297 - protein, 40 aa, Artificial Sequence
  Description of Artificial Sequence: Synthetic polypeptide
AIFSTFIGEHYVHVNATYVNVKCVAPYPSLLSSEDNADDE

SEQ ID NO: 4298 - protein, 40 aa, Artificial Sequence
  Description of Artificial Sequence: Synthetic polypeptide
STRFYDQLNHHIFELVSSSDANERKGGILAIASLIGVEGG

SEQ ID NO: 4299 - protein, 40 aa, Artificial Sequence
  Description of Artificial Sequence: Synthetic polypeptide
EASDVGSITLALRTLGSFEFEGHSLTQFVRHCADHFLNSE

SEQ ID NO: 4300 - protein, 40 aa, Artificial Sequence
  Description of Artificial Sequence: Synthetic polypeptide
ALILKLKDPDPDPNPGVINNVLATIGELAQVSGLEMRKWV

SEQ ID NO: 4301 - protein, 40 aa, Artificial Sequence
  Description of Artificial Sequence: Synthetic polypeptide
MKDPDPDPNPGVINNVLATIGELAQVSGLEMRKWVDELFI

SEQ ID NO: 4302 - protein, 40 aa, Artificial Sequence
  Description of Artificial Sequence: Synthetic polypeptide
DSSLLAKRQVALWTLGQLVASTGYVVEPYRKYPTLLEVLL

SEQ ID NO: 4303 - protein, 40 aa, Artificial Sequence
  Description of Artificial Sequence: Synthetic polypeptide
MRSTAMDTLSSLVFQLGKKYQIFIPMVNKVLVRHRINHQR

SEQ ID NO: 4304 - protein, 40 aa, Artificial Sequence
  Description of Artificial Sequence: Synthetic polypeptide
EGLEEASRLYFGERNVKGMFEVLEPLHAMMERGPQTLKET

SEQ ID NO: 4305 - protein, 40 aa, Artificial Sequence
  Description of Artificial Sequence: Synthetic polypeptide
VFEHAVNNTAGDDLAKLLWLKSPSSEVWFDRRTNYTRSLA

SEQ ID NO: 4306 - protein, 40 aa, Artificial Sequence
  Description of Artificial Sequence: Synthetic polypeptide
SVEILDGVELGEPAHKKTGTTVPESIHSFIGDGLVKPEAL

SEQ ID NO: 4307 - protein, 40 aa, Artificial Sequence
  Description of Artificial Sequence: Synthetic polypeptide
GVELGEPAHKKTGTTVPESIHSFIGDGLVKPEALNKKAIQ

SEQ ID NO: 4308 - protein, 40 aa, Artificial Sequence
  Description of Artificial Sequence: Synthetic polypeptide
ELGEPAHKKTGTTVPESIHSFIGDGLVKPEALNKKAIQII

SEQ ID NO: 4309 - protein, 40 aa, Artificial Sequence
  Description of Artificial Sequence: Synthetic polypeptide
GEPAHKKTGTTVPESIHSFIGDGLVKPEALNKKAIQIINR

SEQ ID NO: 4310 - protein, 40 aa, Artificial Sequence
  Description of Artificial Sequence: Synthetic polypeptide
EPAHKKTGTTVPESIHSFIGDGLVKPEALNKKAIQIINRV

SEQ ID NO: 4311 - protein, 40 aa, Artificial Sequence
  Description of Artificial Sequence: Synthetic polypeptide
PAHKKTGTTVPESIHSFIGDGLVKPEALNKKAIQIINRVR

SEQ ID NO: 4312 - protein, 40 aa, Artificial Sequence
  Description of Artificial Sequence: Synthetic polypeptide
VLERQRRNELKRSFFALRDQIPELENNEKAPKVVILKKAT

SEQ ID NO: 4313 - protein, 40 aa, Artificial Sequence
  Description of Artificial Sequence: Synthetic polypeptide
MERQRRNELKRSFFALRDQIPELENNEKAPKVVILKKATA

SEQ ID NO: 4314 - protein, 40 aa, Artificial Sequence
  Description of Artificial Sequence: Synthetic polypeptide
QRRNELKRSFFALRDQIPELENNEKAPKVVILKKATAYIL

SEQ ID NO: 4315 - protein, 40 aa, Artificial Sequence
  Description of Artificial Sequence: Synthetic polypeptide
MENNEKAPKVVILKKATAYILSVQAEEQKLISEEDLLRKR

SEQ ID NO: 4316 - protein, 40 aa, Artificial Sequence
  Description of Artificial Sequence: Synthetic polypeptide
ENNEKAPKVVILKKATAYILSVQAEEQKLISEEDLLRKRR

SEQ ID NO: 4317 - protein, 40 aa, Artificial Sequence
  Description of Artificial Sequence: Synthetic polypeptide
NEKAPKVVILKKATAYILSVQAEEQKLISEEDLLRKRREQ

SEQ ID NO: 4318 - protein, 40 aa, Artificial Sequence
  Description of Artificial Sequence: Synthetic polypeptide
SQEEASERGPQEEVLERDAAGEKEDEEDEEIVSPPPVESE

SEQ ID NO: 4319 - protein, 40 aa, Artificial Sequence
  Description of Artificial Sequence: Synthetic polypeptide
FGLGGLGGLTPNPVILQDCMWSGFSAREKLERAVSEKLQH

SEQ ID NO: 4320 - protein, 40 aa, Artificial Sequence
  Description of Artificial Sequence: Synthetic polypeptide
FPVNKREPAPVPAAPASAPAAGPAVASGAGIAAPAGAPGV

SEQ ID NO: 4321 - protein, 40 aa, Artificial Sequence
  Description of Artificial Sequence: Synthetic polypeptide
PVNKREPAPVPAAPASAPAAGPAVASGAGIAAPAGAPGVA

SEQ ID NO: 4322 - protein, 40 aa, Artificial Sequence
  Description of Artificial Sequence: Synthetic polypeptide
VNKREPAPVPAAPASAPAAGPAVASGAGIAAPAGAPGVAP

SEQ ID NO: 4323 - protein, 40 aa, Artificial Sequence
  Description of Artificial Sequence: Synthetic polypeptide
NKREPAPVPAAPASAPAAGPAVASGAGIAAPAGAPGVAPP

SEQ ID NO: 4324 - protein, 40 aa, Artificial Sequence
  Description of Artificial Sequence: Synthetic polypeptide
KREPAPVPAAPASAPAAGPAVASGAGIAAPAGAPGVAPPR

SEQ ID NO: 4325 - protein, 40 aa, Artificial Sequence
  Description of Artificial Sequence: Synthetic polypeptide
EPAPVPAAPASAPAAGPAVASGAGIAAPAGAPGVAPPRPG

SEQ ID NO: 4326 - protein, 40 aa, Artificial Sequence
  Description of Artificial Sequence: Synthetic polypeptide
PAPVPAAPASAPAAGPAVASGAGIAAPAGAPGVAPPRPGG

SEQ ID NO: 4327 - protein, 40 aa, Artificial Sequence
  Description of Artificial Sequence: Synthetic polypeptide
VPAAPASAPAAGPAVASGAGIAAPAGAPGVAPPRPGGRQT

SEQ ID NO: 4328 - protein, 40 aa, Artificial Sequence
  Description of Artificial Sequence: Synthetic polypeptide
PLASDSRKRKLPCDTPGQGLTCSGEKRRREQESKYIEELA

SEQ ID NO: 4329 - protein, 40 aa, Artificial Sequence
  Description of Artificial Sequence: Synthetic polypeptide
MASDSRKRKLPCDTPGQGLTCSGEKRRREQESKYIEELAE

SEQ ID NO: 4330 - protein, 40 aa, Artificial Sequence
  Description of Artificial Sequence: Synthetic polypeptide
REQESKYIEELAELISANLSDIDNFNVKPDKCAILKETVR

SEQ ID NO: 4331 - protein, 40 aa, Artificial Sequence
  Description of Artificial Sequence: Synthetic polypeptide
QESKYIEELAELISANLSDIDNFNVKPDKCAILKETVRQI

SEQ ID NO: 4332 - protein, 40 aa, Artificial Sequence
  Description of Artificial Sequence: Synthetic polypeptide
SKYIEELAELISANLSDIDNFNVKPDKCAILKETVRQIRQ

SEQ ID NO: 4333 - protein, 40 aa, Artificial Sequence
  Description of Artificial Sequence: Synthetic polypeptide
IEELAELISANLSDIDNFNVKPDKCAILKETVRQIRQIKE

SEQ ID NO: 4334 - protein, 40 aa, Artificial Sequence
  Description of Artificial Sequence: Synthetic polypeptide
ELISANLSDIDNFNVKPDKCAILKETVRQIRQIKEQGKTI

SEQ ID NO: 4335 - protein, 40 aa, Artificial Sequence
  Description of Artificial Sequence: Synthetic polypeptide
MISANLSDIDNFNVKPDKCAILKETVRQIRQIKEQGKTIS

SEQ ID NO: 4336 - protein, 40 aa, Artificial Sequence
  Description of Artificial Sequence: Synthetic polypeptide
NFNVKPDKCAILKETVRQIRQIKEQGKTISNDDDVQKADV

SEQ ID NO: 4337 - protein, 40 aa, Artificial Sequence
  Description of Artificial Sequence: Synthetic polypeptide
KPDKCAILKETVRQIRQIKEQGKTISNDDDVQKADVSSTG

SEQ ID NO: 4338 - protein, 40 aa, Artificial Sequence
  Description of Artificial Sequence: Synthetic polypeptide
ILKETVRQIRQIKEQGKTISNDDDVQKADVSSTGQGVIDK

SEQ ID NO: 4339 - protein, 40 aa, Artificial Sequence
  Description of Artificial Sequence: Synthetic polypeptide
KADVSSTGQGVIDKDSLGPLLLQALDGFLFVVNRDGNIVF

SEQ ID NO: 4340 - protein, 40 aa, Artificial Sequence
  Description of Artificial Sequence: Synthetic polypeptide
GQGVIDKDSLGPLLLQALDGFLFVVNRDGNIVFVSENVTQ

SEQ ID NO: 4341 - protein, 40 aa, Artificial Sequence
  Description of Artificial Sequence: Synthetic polypeptide
GVIDKDSLGPLLLQALDGFLFVVNRDGNIVFVSENVTQYL

SEQ ID NO: 4342 - protein, 40 aa, Artificial Sequence
  Description of Artificial Sequence: Synthetic polypeptide
VIDKDSLGPLLLQALDGFLFVVNRDGNIVFVSENVTQYLQ

SEQ ID NO: 4343 - protein, 40 aa, Artificial Sequence
  Description of Artificial Sequence: Synthetic polypeptide
SLGPLLLQALDGFLFVVNRDGNIVFVSENVTQYLQYKQED

SEQ ID NO: 4344 - protein, 40 aa, Artificial Sequence
  Description of Artificial Sequence: Synthetic polypeptide
LLQALDGFLFVVNRDGNIVFVSENVTQYLQYKQEDLVNTS

SEQ ID NO: 4345 - protein, 40 aa, Artificial Sequence
  Description of Artificial Sequence: Synthetic polypeptide
LQALDGFLFVVNRDGNIVFVSENVTQYLQYKQEDLVNTSV

SEQ ID NO: 4346 - protein, 40 aa, Artificial Sequence
  Description of Artificial Sequence: Synthetic polypeptide
ALDGFLFVVNRDGNIVFVSENVTQYLQYKQEDLVNTSVYN

SEQ ID NO: 4347 - protein, 40 aa, Artificial Sequence
  Description of Artificial Sequence: Synthetic polypeptide
DGFLFVVNRDGNIVFVSENVTQYLQYKQEDLVNTSVYNIL

SEQ ID NO: 4348 - protein, 40 aa, Artificial Sequence
  Description of Artificial Sequence: Synthetic polypeptide
DGNIVFVSENVTQYLQYKQEDLVNTSVYNILHEEDRKDFL

SEQ ID NO: 4349 - protein, 40 aa, Artificial Sequence
  Description of Artificial Sequence: Synthetic polypeptide
MVNTSVYNILHEEDRKDFLKNLPKSTVNGVSWTNETQRQK

SEQ ID NO: 4350 - protein, 40 aa, Artificial Sequence
  Description of Artificial Sequence: Synthetic polypeptide
VNTSVYNILHEEDRKDFLKNLPKSTVNGVSWTNETQRQKS

SEQ ID NO: 4351 - protein, 40 aa, Artificial Sequence
  Description of Artificial Sequence: Synthetic polypeptide
TSVYNILHEEDRKDFLKNLPKSTVNGVSWTNETQRQKSHT

SEQ ID NO: 4352 - protein, 40 aa, Artificial Sequence
  Description of Artificial Sequence: Synthetic polypeptide
SVYNILHEEDRKDFLKNLPKSTVNGVSWTNETQRQKSHTF

SEQ ID NO: 4353 - protein, 40 aa, Artificial Sequence
  Description of Artificial Sequence: Synthetic polypeptide
VYNILHEEDRKDFLKNLPKSTVNGVSWTNETQRQKSHTFN

SEQ ID NO: 4354 - protein, 40 aa, Artificial Sequence
  Description of Artificial Sequence: Synthetic polypeptide
YNILHEEDRKDFLKNLPKSTVNGVSWTNETQRQKSHTFNC

SEQ ID NO: 4355 - protein, 40 aa, Artificial Sequence
  Description of Artificial Sequence: Synthetic polypeptide
NILHEEDRKDFLKNLPKSTVNGVSWTNETQRQKSHTFNCR

SEQ ID NO: 4356 - protein, 40 aa, Artificial Sequence
  Description of Artificial Sequence: Synthetic polypeptide
ILHEEDRKDFLKNLPKSTVNGVSWTNETQRQKSHTFNCRM

SEQ ID NO: 4357 - protein, 40 aa, Artificial Sequence
  Description of Artificial Sequence: Synthetic polypeptide
LHEEDRKDFLKNLPKSTVNGVSWTNETQRQKSHTFNCRML

SEQ ID NO: 4358 - protein, 40 aa, Artificial Sequence
  Description of Artificial Sequence: Synthetic polypeptide
HEEDRKDFLKNLPKSTVNGVSWTNETQRQKSHTFNCRMLM

SEQ ID NO: 4359 - protein, 40 aa, Artificial Sequence
  Description of Artificial Sequence: Synthetic polypeptide
EEDRKDFLKNLPKSTVNGVSWTNETQRQKSHTFNCRMLMK

SEQ ID NO: 4360 - protein, 40 aa, Artificial Sequence
  Description of Artificial Sequence: Synthetic polypeptide
DRKDFLKNLPKSTVNGVSWTNETQRQKSHTFNCRMLMKTP

SEQ ID NO: 4361 - protein, 40 aa, Artificial Sequence
  Description of Artificial Sequence: Synthetic polypeptide
DFLKNLPKSTVNGVSWTNETQRQKSHTFNCRMLMKTPHDI

SEQ ID NO: 4362 - protein, 40 aa, Artificial Sequence
  Description of Artificial Sequence: Synthetic polypeptide
FLKNLPKSTVNGVSWTNETQRQKSHTFNCRMLMKTPHDIL

SEQ ID NO: 4363 - protein, 40 aa, Artificial Sequence
  Description of Artificial Sequence: Synthetic polypeptide
STVNGVSWTNETQRQKSHTFNCRMLMKTPHDILEDINASP

SEQ ID NO: 4364 - protein, 40 aa, Artificial Sequence
  Description of Artificial Sequence: Synthetic polypeptide
HDLSGKVVNIDTNSLRSSMRPGFEDIIRRCIQRFFSLNDG

SEQ ID NO: 4365 - protein, 40 aa, Artificial Sequence
  Description of Artificial Sequence: Synthetic polypeptide
TSLLSTLSSPGPKLDNSPNMNITQPSKVSNQDSKSPLGFY

SEQ ID NO: 4366 - protein, 40 aa, Artificial Sequence
  Description of Artificial Sequence: Synthetic polypeptide
VSNQDSKSPLGFYCDQNPVESSMCQSNSRDHLSDKESKES

SEQ ID NO: 4367 - protein, 40 aa, Artificial Sequence
  Description of Artificial Sequence: Synthetic polypeptide
MCQSNSRDHLSDKESKESSVEGAENQRGPLESKGHKKLLQ

SEQ ID NO: 4368 - protein, 40 aa, Artificial Sequence
  Description of Artificial Sequence: Synthetic polypeptide
GVDNKMSQCTSSTIPSSSQEKDPKIKTETSEEGSGDLDNL

SEQ ID NO: 4369 - protein, 40 aa, Artificial Sequence
  Description of Artificial Sequence: Synthetic polypeptide
PKIKTETSEEGSGDLDNLDAILGDLTSSDFYNNSISSNGS

SEQ ID NO: 4370 - protein, 40 aa, Artificial Sequence
  Description of Artificial Sequence: Synthetic polypeptide
VSLDSPVSVGSSPPVKNISAFPMLPKQPMLGGNPRMMDSQ

SEQ ID NO: 4371 - protein, 40 aa, Artificial Sequence
  Description of Artificial Sequence: Synthetic polypeptide
FLNQSRQALELKMENPTAGGAAVMRPMMQPQVSSQQGFLN

SEQ ID NO: 4372 - protein, 40 aa, Artificial Sequence
  Description of Artificial Sequence: Synthetic polypeptide
SRQALELKMENPTAGGAAVMRPMMQPQVSSQQGFLNAQMV

SEQ ID NO: 4373 - protein, 40 aa, Artificial Sequence
  Description of Artificial Sequence: Synthetic polypeptide
PTAGGAAVMRPMMQPQVSSQQGFLNAQMVAQRSRELLSHH

SEQ ID NO: 4374 - protein, 40 aa, Artificial Sequence
  Description of Artificial Sequence: Synthetic polypeptide
TAGGAAVMRPMMQPQVSSQQGFLNAQMVAQRSRELLSHHF

SEQ ID NO: 4375 - protein, 40 aa, Artificial Sequence
  Description of Artificial Sequence: Synthetic polypeptide
AGGAAVMRPMMQPQVSSQQGFLNAQMVAQRSRELLSHHFR

SEQ ID NO: 4376 - protein, 40 aa, Artificial Sequence
  Description of Artificial Sequence: Synthetic polypeptide
GGAAVMRPMMQPQVSSQQGFLNAQMVAQRSRELLSHHFRQ

SEQ ID NO: 4377 - protein, 40 aa, Artificial Sequence
  Description of Artificial Sequence: Synthetic polypeptide
AVMRPMMQPQVSSQQGFLNAQMVAQRSRELLSHHFRQQRV

SEQ ID NO: 4378 - protein, 40 aa, Artificial Sequence
  Description of Artificial Sequence: Synthetic polypeptide
MQPQVSSQQGFLNAQMVAQRSRELLSHHFRQQRVAMMMQQ

SEQ ID NO: 4379 - protein, 40 aa, Artificial Sequence
  Description of Artificial Sequence: Synthetic polypeptide
QDMDLIDILWRQDIDLGVSREVFDFSQRRKEYELEKQKKL

SEQ ID NO: 4380 - protein, 40 aa, Artificial Sequence
  Description of Artificial Sequence: Synthetic polypeptide
QDIDLGVSREVFDFSQRRKEYELEKQKKLEKERQEQLQKE

SEQ ID NO: 4381 - protein, 40 aa, Artificial Sequence
  Description of Artificial Sequence: Synthetic polypeptide
DLGVSREVFDFSQRRKEYELEKQKKLEKERQEQLQKEQEK

SEQ ID NO: 4382 - protein, 40 aa, Artificial Sequence
  Description of Artificial Sequence: Synthetic polypeptide
SREVFDFSQRRKEYELEKQKKLEKERQEQLQKEQEKAFFA

SEQ ID NO: 4383 - protein, 40 aa, Artificial Sequence
  Description of Artificial Sequence: Synthetic polypeptide
REVFDFSQRRKEYELEKQKKLEKERQEQLQKEQEKAFFAQ

SEQ ID NO: 4384 - protein, 40 aa, Artificial Sequence
  Description of Artificial Sequence: Synthetic polypeptide
VFDFSQRRKEYELEKQKKLEKERQEQLQKEQEKAFFAQLQ

SEQ ID NO: 4385 - protein, 40 aa, Artificial Sequence
  Description of Artificial Sequence: Synthetic polypeptide
FDFSQRRKEYELEKQKKLEKERQEQLQKEQEKAFFAQLQL

SEQ ID NO: 4386 - protein, 40 aa, Artificial Sequence
  Description of Artificial Sequence: Synthetic polypeptide
DFSQRRKEYELEKQKKLEKERQEQLQKEQEKAFFAQLQLD

SEQ ID NO: 4387 - protein, 40 aa, Artificial Sequence
  Description of Artificial Sequence: Synthetic polypeptide
FSQRRKEYELEKQKKLEKERQEQLQKEQEKAFFAQLQLDE

SEQ ID NO: 4388 - protein, 40 aa, Artificial Sequence
  Description of Artificial Sequence: Synthetic polypeptide
SQRRKEYELEKQKKLEKERQEQLQKEQEKAFFAQLQLDEE

SEQ ID NO: 4389 - protein, 40 aa, Artificial Sequence
  Description of Artificial Sequence: Synthetic polypeptide
ELEKQKKLEKERQEQLQKEQEKAFFAQLQLDEETGEFLPI

SEQ ID NO: 4390 - protein, 40 aa, Artificial Sequence
  Description of Artificial Sequence: Synthetic polypeptide
MEKQKKLEKERQEQLQKEQEKAFFAQLQLDEETGEFLPIQ

SEQ ID NO: 4391 - protein, 40 aa, Artificial Sequence
  Description of Artificial Sequence: Synthetic polypeptide
EKQKKLEKERQEQLQKEQEKAFFAQLQLDEETGEFLPIQP

SEQ ID NO: 4392 - protein, 40 aa, Artificial Sequence
  Description of Artificial Sequence: Synthetic polypeptide
DKLVETTMVPSPEAKLTEVDNYHFYSSIPSMEKEVGNCSP

SEQ ID NO: 4393 - protein, 40 aa, Artificial Sequence
  Description of Artificial Sequence: Synthetic polypeptide
MVETTMVPSPEAKLTEVDNYHFYSSIPSMEKEVGNCSPHF

SEQ ID NO: 4394 - protein, 40 aa, Artificial Sequence
  Description of Artificial Sequence: Synthetic polypeptide
ETTMVPSPEAKLTEVDNYHFYSSIPSMEKEVGNCSPHFLN

SEQ ID NO: 4395 - protein, 40 aa, Artificial Sequence
  Description of Artificial Sequence: Synthetic polypeptide
TTMVPSPEAKLTEVDNYHFYSSIPSMEKEVGNCSPHFLNA

SEQ ID NO: 4396 - protein, 40 aa, Artificial Sequence
  Description of Artificial Sequence: Synthetic polypeptide
TMVPSPEAKLTEVDNYHFYSSIPSMEKEVGNCSPHFLNAF

SEQ ID NO: 4397 - protein, 40 aa, Artificial Sequence
  Description of Artificial Sequence: Synthetic polypeptide
VPSPEAKLTEVDNYHFYSSIPSMEKEVGNCSPHFLNAFED

SEQ ID NO: 4398 - protein, 40 aa, Artificial Sequence
  Description of Artificial Sequence: Synthetic polypeptide
PSPEAKLTEVDNYHFYSSIPSMEKEVGNCSPHFLNAFEDS

SEQ ID NO: 4399 - protein, 40 aa, Artificial Sequence
  Description of Artificial Sequence: Synthetic polypeptide
SPEAKLTEVDNYHFYSSIPSMEKEVGNCSPHFLNAFEDSF

SEQ ID NO: 4400 - protein, 40 aa, Artificial Sequence
  Description of Artificial Sequence: Synthetic polypeptide
PEAKLTEVDNYHFYSSIPSMEKEVGNCSPHFLNAFEDSFS

SEQ ID NO: 4401 - protein, 40 aa, Artificial Sequence
  Description of Artificial Sequence: Synthetic polypeptide
EAKLTEVDNYHFYSSIPSMEKEVGNCSPHFLNAFEDSFSS

SEQ ID NO: 4402 - protein, 40 aa, Artificial Sequence
  Description of Artificial Sequence: Synthetic polypeptide
AKLTEVDNYHFYSSIPSMEKEVGNCSPHFLNAFEDSFSSI

SEQ ID NO: 4403 - protein, 40 aa, Artificial Sequence
  Description of Artificial Sequence: Synthetic polypeptide
KLTEVDNYHFYSSIPSMEKEVGNCSPHFLNAFEDSFSSIL

SEQ ID NO: 4404 - protein, 40 aa, Artificial Sequence
  Description of Artificial Sequence: Synthetic polypeptide
MTEVDNYHFYSSIPSMEKEVGNCSPHFLNAFEDSFSSILS

SEQ ID NO: 4405 - protein, 40 aa, Artificial Sequence
  Description of Artificial Sequence: Synthetic polypeptide
TEVDNYHFYSSIPSMEKEVGNCSPHFLNAFEDSFSSILST

SEQ ID NO: 4406 - protein, 40 aa, Artificial Sequence
  Description of Artificial Sequence: Synthetic polypeptide
EVDNYHFYSSIPSMEKEVGNCSPHFLNAFEDSFSSILSTE

SEQ ID NO: 4407 - protein, 40 aa, Artificial Sequence
  Description of Artificial Sequence: Synthetic polypeptide
NYHFYSSIPSMEKEVGNCSPHFLNAFEDSFSSILSTEDPN

SEQ ID NO: 4408 - protein, 40 aa, Artificial Sequence
  Description of Artificial Sequence: Synthetic polypeptide
HFYSSIPSMEKEVGNCSPHFLNAFEDSFSSILSTEDPNQL

SEQ ID NO: 4409 - protein, 40 aa, Artificial Sequence
  Description of Artificial Sequence: Synthetic polypeptide
NEMMSKEQFNEAQLALIRDIRRRGKNKVAAQNCRKRKLEN

SEQ ID NO: 4410 - protein, 40 aa, Artificial Sequence
  Description of Artificial Sequence: Synthetic polypeptide
KEQFNEAQLALIRDIRRRGKNKVAAQNCRKRKLENIVELE

SEQ ID NO: 4411 - protein, 40 aa, Artificial Sequence
  Description of Artificial Sequence: Synthetic polypeptide
EQFNEAQLALIRDIRRRGKNKVAAQNCRKRKLENIVELEQ

SEQ ID NO: 4412 - protein, 40 aa, Artificial Sequence
  Description of Artificial Sequence: Synthetic polypeptide
NEAQLALIRDIRRRGKNKVAAQNCRKRKLENIVELEQDLD

SEQ ID NO: 4413 - protein, 40 aa, Artificial Sequence
  Description of Artificial Sequence: Synthetic polypeptide
EAQLALIRDIRRRGKNKVAAQNCRKRKLENIVELEQDLDH

SEQ ID NO: 4414 - protein, 40 aa, Artificial Sequence
  Description of Artificial Sequence: Synthetic polypeptide
AQLALIRDIRRRGKNKVAAQNCRKRKLENIVELEQDLDHL

SEQ ID NO: 4415 - protein, 40 aa, Artificial Sequence
  Description of Artificial Sequence: Synthetic polypeptide
QLALIRDIRRRGKNKVAAQNCRKRKLENIVELEQDLDHLK

SEQ ID NO: 4416 - protein, 40 aa, Artificial Sequence
  Description of Artificial Sequence: Synthetic polypeptide
ALIRDIRRRGKNKVAAQNCRKRKLENIVELEQDLDHLKDE

SEQ ID NO: 4417 - protein, 40 aa, Artificial Sequence
  Description of Artificial Sequence: Synthetic polypeptide
LIRDIRRRGKNKVAAQNCRKRKLENIVELEQDLDHLKDEK

SEQ ID NO: 4418 - protein, 40 aa, Artificial Sequence
  Description of Artificial Sequence: Synthetic polypeptide
DIRRRGKNKVAAQNCRKRKLENIVELEQDLDHLKDEKEKL

SEQ ID NO: 4419 - protein, 40 aa, Artificial Sequence
  Description of Artificial Sequence: Synthetic polypeptide
RRGKNKVAAQNCRKRKLENIVELEQDLDHLKDEKEKLLKE

SEQ ID NO: 4420 - protein, 40 aa, Artificial Sequence
  Description of Artificial Sequence: Synthetic polypeptide
GKNKVAAQNCRKRKLENIVELEQDLDHLKDEKEKLLKEKG

SEQ ID NO: 4421 - protein, 40 aa, Artificial Sequence
  Description of Artificial Sequence: Synthetic polypeptide
NKVAAQNCRKRKLENIVELEQDLDHLKDEKEKLLKEKGEN

SEQ ID NO: 4422 - protein, 40 aa, Artificial Sequence
  Description of Artificial Sequence: Synthetic polypeptide
AAQNCRKRKLENIVELEQDLDHLKDEKEKLLKEKGENDKS

SEQ ID NO: 4423 - protein, 40 aa, Artificial Sequence
  Description of Artificial Sequence: Synthetic polypeptide
QNCRKRKLENIVELEQDLDHLKDEKEKLLKEKGENDKSLH

SEQ ID NO: 4424 - protein, 40 aa, Artificial Sequence
  Description of Artificial Sequence: Synthetic polypeptide
MENIVELEQDLDHLKDEKEKLLKEKGENDKSLHLLKKQLS

SEQ ID NO: 4425 - protein, 40 aa, Artificial Sequence
  Description of Artificial Sequence: Synthetic polypeptide
ENIVELEQDLDHLKDEKEKLLKEKGENDKSLHLLKKQLST

SEQ ID NO: 4426 - protein, 40 aa, Artificial Sequence
  Description of Artificial Sequence: Synthetic polypeptide
IVELEQDLDHLKDEKEKLLKEKGENDKSLHLLKKQLSTLY

SEQ ID NO: 4427 - protein, 40 aa, Artificial Sequence
  Description of Artificial Sequence: Synthetic polypeptide
LEQDLDHLKDEKEKLLKEKGENDKSLHLLKKQLSTLYLEV

SEQ ID NO: 4428 - protein, 40 aa, Artificial Sequence
  Description of Artificial Sequence: Synthetic polypeptide
MLKEKGENDKSLHLLKKQLSTLYLEVFSMLRDEDGKPYSP

SEQ ID NO: 4429 - protein, 40 aa, Artificial Sequence
  Description of Artificial Sequence: Synthetic polypeptide
LKEKGENDKSLHLLKKQLSTLYLEVFSMLRDEDGKPYSPS

SEQ ID NO: 4430 - protein, 40 aa, Artificial Sequence
  Description of Artificial Sequence: Synthetic polypeptide
KEKGENDKSLHLLKKQLSTLYLEVFSMLRDEDGKPYSPSE

SEQ ID NO: 4431 - protein, 40 aa, Artificial Sequence
  Description of Artificial Sequence: Synthetic polypeptide
VVPVLVRDGQPCGGGGGGEVGTAAAQEKCGAPPAAACPLP

SEQ ID NO: 4432 - protein, 40 aa, Artificial Sequence
  Description of Artificial Sequence: Synthetic polypeptide
VRDGQPCGGGGGGEVGTAAAQEKCGAPPAAACPLPGYPAF

SEQ ID NO: 4433 - protein, 40 aa, Artificial Sequence
  Description of Artificial Sequence: Synthetic polypeptide
RDGQPCGGGGGGEVGTAAAQEKCGAPPAAACPLPGYPAFG

SEQ ID NO: 4434 - protein, 40 aa, Artificial Sequence
  Description of Artificial Sequence: Synthetic polypeptide
GGGGGEVGTAAAQEKCGAPPAAACPLPGYPAFGPGSALGL

SEQ ID NO: 4435 - protein, 40 aa, Artificial Sequence
  Description of Artificial Sequence: Synthetic polypeptide
GGGGEVGTAAAQEKCGAPPAAACPLPGYPAFGPGSALGLF

SEQ ID NO: 4436 - protein, 40 aa, Artificial Sequence
  Description of Artificial Sequence: Synthetic polypeptide
LCLALLPALAARGPRCSQPGETCLNGGKCEAANGTEACVC

SEQ ID NO: 4437 - protein, 40 aa, Artificial Sequence
  Description of Artificial Sequence: Synthetic polypeptide
VDTKQAHELAKSYGIPFIETSAKTRQGVEDAFYTLVREIR

SEQ ID NO: 4438 - protein, 40 aa, Artificial Sequence
  Description of Artificial Sequence: Synthetic polypeptide
TKQAHELAKSYGIPFIETSAKTRQGVEDAFYTLVREIRQY

SEQ ID NO: 4439 - protein, 40 aa, Artificial Sequence
  Description of Artificial Sequence: Synthetic polypeptide
KQAHELAKSYGIPFIETSAKTRQGVEDAFYTLVREIRQYR

SEQ ID NO: 4440 - protein, 40 aa, Artificial Sequence
  Description of Artificial Sequence: Synthetic polypeptide
AHELAKSYGIPFIETSAKTRQGVEDAFYTLVREIRQYRMK

SEQ ID NO: 4441 - protein, 40 aa, Artificial Sequence
  Description of Artificial Sequence: Synthetic polypeptide
HELAKSYGIPFIETSAKTRQGVEDAFYTLVREIRQYRMKK

SEQ ID NO: 4442 - protein, 40 aa, Artificial Sequence
  Description of Artificial Sequence: Synthetic polypeptide
ELAKSYGIPFIETSAKTRQGVEDAFYTLVREIRQYRMKKL

SEQ ID NO: 4443 - protein, 40 aa, Artificial Sequence
  Description of Artificial Sequence: Synthetic polypeptide
KSYGIPFIETSAKTRQGVEDAFYTLVREIRQYRMKKLNSS

SEQ ID NO: 4444 - protein, 40 aa, Artificial Sequence
  Description of Artificial Sequence: Synthetic polypeptide
IETSAKTRQGVEDAFYTLVREIRQYRMKKLNSSDDGTQGC

SEQ ID NO: 4445 - protein, 40 aa, Artificial Sequence
  Description of Artificial Sequence: Synthetic polypeptide
RDQIPELENNEKAPKVVILKKATAYILSVQAETQKLISEI

SEQ ID NO: 4446 - protein, 40 aa, Artificial Sequence
  Description of Artificial Sequence: Synthetic polypeptide
MENNEKAPKVVILKKATAYILSVQAETQKLISEIDLLRKQ

SEQ ID NO: 4447 - protein, 40 aa, Artificial Sequence
  Description of Artificial Sequence: Synthetic polypeptide
ENNEKAPKVVILKKATAYILSVQAETQKLISEIDLLRKQN

SEQ ID NO: 4448 - protein, 40 aa, Artificial Sequence
  Description of Artificial Sequence: Synthetic polypeptide
PSSGELWGIHLMPPRILVECLLPNGMIVTLECLREATLIT

SEQ ID NO: 4449 - protein, 40 aa, Artificial Sequence
  Description of Artificial Sequence: Synthetic polypeptide
TLECLREATLITIKHELFKEARKYPLHQLLQDESSYIFVS

SEQ ID NO: 4450 - protein, 40 aa, Artificial Sequence
  Description of Artificial Sequence: Synthetic polypeptide
LECLREATLITIKHELFKEARKYPLHQLLQDESSYIFVSV

SEQ ID NO: 4451 - protein, 40 aa, Artificial Sequence
  Description of Artificial Sequence: Synthetic polypeptide
ECLREATLITIKHELFKEARKYPLHQLLQDESSYIFVSVT

SEQ ID NO: 4452 - protein, 40 aa, Artificial Sequence
  Description of Artificial Sequence: Synthetic polypeptide
CLREATLITIKHELFKEARKYPLHQLLQDESSYIFVSVTQ

SEQ ID NO: 4453 - protein, 40 aa, Artificial Sequence
  Description of Artificial Sequence: Synthetic polypeptide
EATLITIKHELFKEARKYPLHQLLQDESSYIFVSVTQEAE

SEQ ID NO: 4454 - protein, 40 aa, Artificial Sequence
  Description of Artificial Sequence: Synthetic polypeptide
LITIKHELFKEARKYPLHQLLQDESSYIFVSVTQEAEREE

SEQ ID NO: 4455 - protein, 40 aa, Artificial Sequence
  Description of Artificial Sequence: Synthetic polypeptide
ITIKHELFKEARKYPLHQLLQDESSYIFVSVTQEAEREEF

SEQ ID NO: 4456 - protein, 40 aa, Artificial Sequence
  Description of Artificial Sequence: Synthetic polypeptide
TIKHELFKEARKYPLHQLLQDESSYIFVSVTQEAEREEFF

SEQ ID NO: 4457 - protein, 40 aa, Artificial Sequence
  Description of Artificial Sequence: Synthetic polypeptide
IKHELFKEARKYPLHQLLQDESSYIFVSVTQEAEREEFFD

SEQ ID NO: 4458 - protein, 40 aa, Artificial Sequence
  Description of Artificial Sequence: Synthetic polypeptide
KHELFKEARKYPLHQLLQDESSYIFVSVTQEAEREEFFDE

SEQ ID NO: 4459 - protein, 40 aa, Artificial Sequence
  Description of Artificial Sequence: Synthetic polypeptide
HELFKEARKYPLHQLLQDESSYIFVSVTQEAEREEFFDET

SEQ ID NO: 4460 - protein, 40 aa, Artificial Sequence
  Description of Artificial Sequence: Synthetic polypeptide
ELFKEARKYPLHQLLQDESSYIFVSVTQEAEREEFFDETR

SEQ ID NO: 4461 - protein, 40 aa, Artificial Sequence
  Description of Artificial Sequence: Synthetic polypeptide
KEARKYPLHQLLQDESSYIFVSVTQEAEREEFFDETRRLC

SEQ ID NO: 4462 - protein, 40 aa, Artificial Sequence
  Description of Artificial Sequence: Synthetic polypeptide
EARKYPLHQLLQDESSYIFVSVTQEAEREEFFDETRRLCD

SEQ ID NO: 4463 - protein, 40 aa, Artificial Sequence
  Description of Artificial Sequence: Synthetic polypeptide
KYPLHQLLQDESSYIFVSVTQEAEREEFFDETRRLCDLRL

SEQ ID NO: 4464 - protein, 40 aa, Artificial Sequence
  Description of Artificial Sequence: Synthetic polypeptide
YPLHQLLQDESSYIFVSVTQEAEREEFFDETRRLCDLRLF

SEQ ID NO: 4465 - protein, 40 aa, Artificial Sequence
  Description of Artificial Sequence: Synthetic polypeptide
HQLLQDESSYIFVSVTQEAEREEFFDETRRLCDLRLFQPF

SEQ ID NO: 4466 - protein, 40 aa, Artificial Sequence
  Description of Artificial Sequence: Synthetic polypeptide
QLLQDESSYIFVSVTQEAEREEFFDETRRLCDLRLFQPFL

SEQ ID NO: 4467 - protein, 40 aa, Artificial Sequence
  Description of Artificial Sequence: Synthetic polypeptide
LLQDESSYIFVSVTQEAEREEFFDETRRLCDLRLFQPFLK

SEQ ID NO: 4468 - protein, 40 aa, Artificial Sequence
  Description of Artificial Sequence: Synthetic polypeptide
LQDESSYIFVSVTQEAEREEFFDETRRLCDLRLFQPFLKV

SEQ ID NO: 4469 - protein, 40 aa, Artificial Sequence
  Description of Artificial Sequence: Synthetic polypeptide
QDESSYIFVSVTQEAEREEFFDETRRLCDLRLFQPFLKVI

SEQ ID NO: 4470 - protein, 40 aa, Artificial Sequence
  Description of Artificial Sequence: Synthetic polypeptide
DESSYIFVSVTQEAEREEFFDETRRLCDLRLFQPFLKVIE

SEQ ID NO: 4471 - protein, 40 aa, Artificial Sequence
  Description of Artificial Sequence: Synthetic polypeptide
ESSYIFVSVTQEAEREEFFDETRRLCDLRLFQPFLKVIEP

SEQ ID NO: 4472 - protein, 40 aa, Artificial Sequence
  Description of Artificial Sequence: Synthetic polypeptide
YIFVSVTQEAEREEFFDETRRLCDLRLFQPFLKVIEPVGN

SEQ ID NO: 4473 - protein, 40 aa, Artificial Sequence
  Description of Artificial Sequence: Synthetic polypeptide
TQEAEREEFFDETRRLCDLRLFQPFLKVIEPVGNREEKIL

SEQ ID NO: 4474 - protein, 40 aa, Artificial Sequence
  Description of Artificial Sequence: Synthetic polypeptide
EREEFFDETRRLCDLRLFQPFLKVIEPVGNREEKILNREI

SEQ ID NO: 4475 - protein, 40 aa, Artificial Sequence
  Description of Artificial Sequence: Synthetic polypeptide
EFFDETRRLCDLRLFQPFLKVIEPVGNREEKILNREIGFA

SEQ ID NO: 4476 - protein, 40 aa, Artificial Sequence
  Description of Artificial Sequence: Synthetic polypeptide
AIGMPVCEFDMVKDPEVQDFRRNILNVCKEAVDLRDLNSP

SEQ ID NO: 4477 - protein, 40 aa, Artificial Sequence
  Description of Artificial Sequence: Synthetic polypeptide
VCKEAVDLRDLNSPHSRAMYVYPPNVESSPELPKHIYNKL

SEQ ID NO: 4478 - protein, 40 aa, Artificial Sequence
  Description of Artificial Sequence: Synthetic polypeptide
KEAVDLRDLNSPHSRAMYVYPPNVESSPELPKHIYNKLDK

SEQ ID NO: 4479 - protein, 40 aa, Artificial Sequence
  Description of Artificial Sequence: Synthetic polypeptide
EAVDLRDLNSPHSRAMYVYPPNVESSPELPKHIYNKLDKG

SEQ ID NO: 4480 - protein, 40 aa, Artificial Sequence
  Description of Artificial Sequence: Synthetic polypeptide
AVDLRDLNSPHSRAMYVYPPNVESSPELPKHIYNKLDKGQ

SEQ ID NO: 4481 - protein, 40 aa, Artificial Sequence
  Description of Artificial Sequence: Synthetic polypeptide
VDLRDLNSPHSRAMYVYPPNVESSPELPKHIYNKLDKGQI

SEQ ID NO: 4482 - protein, 40 aa, Artificial Sequence
  Description of Artificial Sequence: Synthetic polypeptide
DLRDLNSPHSRAMYVYPPNVESSPELPKHIYNKLDKGQII

SEQ ID NO: 4483 - protein, 40 aa, Artificial Sequence
  Description of Artificial Sequence: Synthetic polypeptide
LRDLNSPHSRAMYVYPPNVESSPELPKHIYNKLDKGQIIV

SEQ ID NO: 4484 - protein, 40 aa, Artificial Sequence
  Description of Artificial Sequence: Synthetic polypeptide
LNSPHSRAMYVYPPNVESSPELPKHIYNKLDKGQIIVVIW

SEQ ID NO: 4485 - protein, 40 aa, Artificial Sequence
  Description of Artificial Sequence: Synthetic polypeptide
NSPHSRAMYVYPPNVESSPELPKHIYNKLDKGQIIVVIWV

SEQ ID NO: 4486 - protein, 40 aa, Artificial Sequence
  Description of Artificial Sequence: Synthetic polypeptide
SPHSRAMYVYPPNVESSPELPKHIYNKLDKGQIIVVIWVI

SEQ ID NO: 4487 - protein, 40 aa, Artificial Sequence
  Description of Artificial Sequence: Synthetic polypeptide
HSRAMYVYPPNVESSPELPKHIYNKLDKGQIIVVIWVIVS

SEQ ID NO: 4488 - protein, 40 aa, Artificial Sequence
  Description of Artificial Sequence: Synthetic polypeptide
AMYVYPPNVESSPELPKHIYNKLDKGQIIVVIWVIVSPNN

SEQ ID NO: 4489 - protein, 40 aa, Artificial Sequence
  Description of Artificial Sequence: Synthetic polypeptide
MYVYPPNVESSPELPKHIYNKLDKGQIIVVIWVIVSPNND

SEQ ID NO: 4490 - protein, 40 aa, Artificial Sequence
  Description of Artificial Sequence: Synthetic polypeptide
VYPPNVESSPELPKHIYNKLDKGQIIVVIWVIVSPNNDKQ

SEQ ID NO: 4491 - protein, 40 aa, Artificial Sequence
  Description of Artificial Sequence: Synthetic polypeptide
YPPNVESSPELPKHIYNKLDKGQIIVVIWVIVSPNNDKQK

SEQ ID NO: 4492 - protein, 40 aa, Artificial Sequence
  Description of Artificial Sequence: Synthetic polypeptide
PPNVESSPELPKHIYNKLDKGQIIVVIWVIVSPNNDKQKY

SEQ ID NO: 4493 - protein, 40 aa, Artificial Sequence
  Description of Artificial Sequence: Synthetic polypeptide
PNVESSPELPKHIYNKLDKGQIIVVIWVIVSPNNDKQKYT

SEQ ID NO: 4494 - protein, 40 aa, Artificial Sequence
  Description of Artificial Sequence: Synthetic polypeptide
VESSPELPKHIYNKLDKGQIIVVIWVIVSPNNDKQKYTLK

SEQ ID NO: 4495 - protein, 40 aa, Artificial Sequence
  Description of Artificial Sequence: Synthetic polypeptide
ESSPELPKHIYNKLDKGQIIVVIWVIVSPNNDKQKYTLKI

SEQ ID NO: 4496 - protein, 40 aa, Artificial Sequence
  Description of Artificial Sequence: Synthetic polypeptide
SSPELPKHIYNKLDKGQIIVVIWVIVSPNNDKQKYTLKIN

SEQ ID NO: 4497 - protein, 40 aa, Artificial Sequence
  Description of Artificial Sequence: Synthetic polypeptide
ELPKHIYNKLDKGQIIVVIWVIVSPNNDKQKYTLKINHDC

SEQ ID NO: 4498 - protein, 40 aa, Artificial Sequence
  Description of Artificial Sequence: Synthetic polypeptide
PKHIYNKLDKGQIIVVIWVIVSPNNDKQKYTLKINHDCVP

SEQ ID NO: 4499 - protein, 40 aa, Artificial Sequence
  Description of Artificial Sequence: Synthetic polypeptide
KHIYNKLDKGQIIVVIWVIVSPNNDKQKYTLKINHDCVPE

SEQ ID NO: 4500 - protein, 40 aa, Artificial Sequence
  Description of Artificial Sequence: Synthetic polypeptide
IYNKLDKGQIIVVIWVIVSPNNDKQKYTLKINHDCVPEQV

SEQ ID NO: 4501 - protein, 40 aa, Artificial Sequence
  Description of Artificial Sequence: Synthetic polypeptide
KGQIIVVIWVIVSPNNDKQKYTLKINHDCVPEQVIAEAIR

SEQ ID NO: 4502 - protein, 40 aa, Artificial Sequence
  Description of Artificial Sequence: Synthetic polypeptide
AIRKKTRSMLLSSEQLKLCVLEYQGKYILKVCGCDEYFLE

SEQ ID NO: 4503 - protein, 40 aa, Artificial Sequence
  Description of Artificial Sequence: Synthetic polypeptide
RKKTRSMLLSSEQLKLCVLEYQGKYILKVCGCDEYFLEKY

SEQ ID NO: 4504 - protein, 40 aa, Artificial Sequence
  Description of Artificial Sequence: Synthetic polypeptide
KTRSMLLSSEQLKLCVLEYQGKYILKVCGCDEYFLEKYPL

SEQ ID NO: 4505 - protein, 40 aa, Artificial Sequence
  Description of Artificial Sequence: Synthetic polypeptide
MLSSEQLKLCVLEYQGKYILKVCGCDEYFLEKYPLSQYKY

SEQ ID NO: 4506 - protein, 40 aa, Artificial Sequence
  Description of Artificial Sequence: Synthetic polypeptide
SSEQLKLCVLEYQGKYILKVCGCDEYFLEKYPLSQYKYIR

SEQ ID NO: 4507 - protein, 40 aa, Artificial Sequence
  Description of Artificial Sequence: Synthetic polypeptide
SEQLKLCVLEYQGKYILKVCGCDEYFLEKYPLSQYKYIRS

SEQ ID NO: 4508 - protein, 40 aa, Artificial Sequence
  Description of Artificial Sequence: Synthetic polypeptide
EQLKLCVLEYQGKYILKVCGCDEYFLEKYPLSQYKYIRSC

SEQ ID NO: 4509 - protein, 40 aa, Artificial Sequence
  Description of Artificial Sequence: Synthetic polypeptide
GKYILKVCGCDEYFLEKYPLSQYKYIRSCIMLGRMPNLML

SEQ ID NO: 4510 - protein, 40 aa, Artificial Sequence
  Description of Artificial Sequence: Synthetic polypeptide
CDEYFLEKYPLSQYKYIRSCIMLGRMPNLMLMAKESLYSQ

SEQ ID NO: 4511 - protein, 40 aa, Artificial Sequence
  Description of Artificial Sequence: Synthetic polypeptide
PMDCFTMPSYSRRISTATPYMNGETSTKSLWVINSALRIK

SEQ ID NO: 4512 - protein, 40 aa, Artificial Sequence
  Description of Artificial Sequence: Synthetic polypeptide
DCFTMPSYSRRISTATPYMNGETSTKSLWVINSALRIKIL

SEQ ID NO: 4513 - protein, 40 aa, Artificial Sequence
  Description of Artificial Sequence: Synthetic polypeptide
CFTMPSYSRRISTATPYMNGETSTKSLWVINSALRIKILC

SEQ ID NO: 4514 - protein, 40 aa, Artificial Sequence
  Description of Artificial Sequence: Synthetic polypeptide
PYMNGETSTKSLWVINSALRIKILCATYVNVNIRDIDKIY

SEQ ID NO: 4515 - protein, 40 aa, Artificial Sequence
  Description of Artificial Sequence: Synthetic polypeptide
STKSLWVINSALRIKILCATYVNVNIRDIDKIYVRTGIYH

SEQ ID NO: 4516 - protein, 40 aa, Artificial Sequence
  Description of Artificial Sequence: Synthetic polypeptide
NPNKETPCLELEFDWFSSVVKFPDMSVIEEHANWSVSREA

SEQ ID NO: 4517 - protein, 40 aa, Artificial Sequence
  Description of Artificial Sequence: Synthetic polypeptide
NKETPCLELEFDWFSSVVKFPDMSVIEEHANWSVSREAGF

SEQ ID NO: 4518 - protein, 40 aa, Artificial Sequence
  Description of Artificial Sequence: Synthetic polypeptide
ETPCLELEFDWFSSVVKFPDMSVIEEHANWSVSREAGFSY

SEQ ID NO: 4519 - protein, 40 aa, Artificial Sequence
  Description of Artificial Sequence: Synthetic polypeptide
AMELLDCNYPDPMVRGFAVRCLEKYLTDDKLSQYLIQLVQ

SEQ ID NO: 4520 - protein, 40 aa, Artificial Sequence
  Description of Artificial Sequence: Synthetic polypeptide
MELLDCNYPDPMVRGFAVRCLEKYLTDDKLSQYLIQLVQV

SEQ ID NO: 4521 - protein, 40 aa, Artificial Sequence
  Description of Artificial Sequence: Synthetic polypeptide
ELLDCNYPDPMVRGFAVRCLEKYLTDDKLSQYLIQLVQVL

SEQ ID NO: 4522 - protein, 40 aa, Artificial Sequence
  Description of Artificial Sequence: Synthetic polypeptide
LLDCNYPDPMVRGFAVRCLEKYLTDDKLSQYLIQLVQVLK

SEQ ID NO: 4523 - protein, 40 aa, Artificial Sequence
  Description of Artificial Sequence: Synthetic polypeptide
YPDPMVRGFAVRCLEKYLTDDKLSQYLIQLVQVLKYEQYL

SEQ ID NO: 4524 - protein, 40 aa, Artificial Sequence
  Description of Artificial Sequence: Synthetic polypeptide
VRGFAVRCLEKYLTDDKLSQYLIQLVQVLKYEQYLDNLLV

SEQ ID NO: 4525 - protein, 40 aa, Artificial Sequence
  Description of Artificial Sequence: Synthetic polypeptide
RGFAVRCLEKYLTDDKLSQYLIQLVQVLKYEQYLDNLLVR

SEQ ID NO: 4526 - protein, 40 aa, Artificial Sequence
  Description of Artificial Sequence: Synthetic polypeptide
FAVRCLEKYLTDDKLSQYLIQLVQVLKYEQYLDNLLVRFL

SEQ ID NO: 4527 - protein, 40 aa, Artificial Sequence
  Description of Artificial Sequence: Synthetic polypeptide
LTDDKLSQYLIQLVQVLKYEQYLDNLLVRFLLKKALTNQR

SEQ ID NO: 4528 - protein, 40 aa, Artificial Sequence
  Description of Artificial Sequence: Synthetic polypeptide
LIQLVQVLKYEQYLDNLLVRFLLKKALTNQRIGHFFFWHL

SEQ ID NO: 4529 - protein, 40 aa, Artificial Sequence
  Description of Artificial Sequence: Synthetic polypeptide
YLDNLLVRFLLKKALTNQRIGHFFFWHLKSEMHNKTVSQR

SEQ ID NO: 4530 - protein, 40 aa, Artificial Sequence
  Description of Artificial Sequence: Synthetic polypeptide
LVRFLLKKALTNQRIGHFFFWHLKSEMHNKTVSQRFGLLL

SEQ ID NO: 4531 - protein, 40 aa, Artificial Sequence
  Description of Artificial Sequence: Synthetic polypeptide
VRFLLKKALTNQRIGHFFFWHLKSEMHNKTVSQRFGLLLE

SEQ ID NO: 4532 - protein, 40 aa, Artificial Sequence
  Description of Artificial Sequence: Synthetic polypeptide
FLLKKALTNQRIGHFFFWHLKSEMHNKTVSQRFGLLLESY

SEQ ID NO: 4533 - protein, 40 aa, Artificial Sequence
  Description of Artificial Sequence: Synthetic polypeptide
LLKKALTNQRIGHFFFWHLKSEMHNKTVSQRFGLLLESYC

SEQ ID NO: 4534 - protein, 40 aa, Artificial Sequence
  Description of Artificial Sequence: Synthetic polypeptide
MKKALTNQRIGHFFFWHLKSEMHNKTVSQRFGLLLESYCR

SEQ ID NO: 4535 - protein, 40 aa, Artificial Sequence
  Description of Artificial Sequence: Synthetic polypeptide
KKALTNQRIGHFFFWHLKSEMHNKTVSQRFGLLLESYCRA

SEQ ID NO: 4536 - protein, 40 aa, Artificial Sequence
  Description of Artificial Sequence: Synthetic polypeptide
KALTNQRIGHFFFWHLKSEMHNKTVSQRFGLLLESYCRAC

SEQ ID NO: 4537 - protein, 40 aa, Artificial Sequence
  Description of Artificial Sequence: Synthetic polypeptide
ALTNQRIGHFFFWHLKSEMHNKTVSQRFGLLLESYCRACG

SEQ ID NO: 4538 - protein, 40 aa, Artificial Sequence
  Description of Artificial Sequence: Synthetic polypeptide
MTNQRIGHFFFWHLKSEMHNKTVSQRFGLLLESYCRACGM

SEQ ID NO: 4539 - protein, 40 aa, Artificial Sequence
  Description of Artificial Sequence: Synthetic polypeptide
TNQRIGHFFFWHLKSEMHNKTVSQRFGLLLESYCRACGMY

SEQ ID NO: 4540 - protein, 40 aa, Artificial Sequence
  Description of Artificial Sequence: Synthetic polypeptide
NQRIGHFFFWHLKSEMHNKTVSQRFGLLLESYCRACGMYL

SEQ ID NO: 4541 - protein, 40 aa, Artificial Sequence
  Description of Artificial Sequence: Synthetic polypeptide
FFWHLKSEMHNKTVSQRFGLLLESYCRACGMYLKHLNRQV

SEQ ID NO: 4542 - protein, 40 aa, Artificial Sequence
  Description of Artificial Sequence: Synthetic polypeptide
GMYLKHLNRQVEAMEKLINLTDILKQEKKDETQKVQMKFL

SEQ ID NO: 4543 - protein, 40 aa, Artificial Sequence
  Description of Artificial Sequence: Synthetic polypeptide
QVEAMEKLINLTDILKQEKKDETQKVQMKFLVEQMRRPDF

SEQ ID NO: 4544 - protein, 40 aa, Artificial Sequence
  Description of Artificial Sequence: Synthetic polypeptide
LINLTDILKQEKKDETQKVQMKFLVEQMRRPDFMDALQGF

SEQ ID NO: 4545 - protein, 40 aa, Artificial Sequence
  Description of Artificial Sequence: Synthetic polypeptide
INLTDILKQEKKDETQKVQMKFLVEQMRRPDFMDALQGFL

SEQ ID NO: 4546 - protein, 40 aa, Artificial Sequence
  Description of Artificial Sequence: Synthetic polypeptide
LTDILKQEKKDETQKVQMKFLVEQMRRPDFMDALQGFLSP

SEQ ID NO: 4547 - protein, 40 aa, Artificial Sequence
  Description of Artificial Sequence: Synthetic polypeptide
TDILKQEKKDETQKVQMKFLVEQMRRPDFMDALQGFLSPL

SEQ ID NO: 4548 - protein, 40 aa, Artificial Sequence
  Description of Artificial Sequence: Synthetic polypeptide
ILKQEKKDETQKVQMKFLVEQMRRPDFMDALQGFLSPLNP

SEQ ID NO: 4549 - protein, 40 aa, Artificial Sequence
  Description of Artificial Sequence: Synthetic polypeptide
KQEKKDETQKVQMKFLVEQMRRPDFMDALQGFLSPLNPAH

SEQ ID NO: 4550 - protein, 40 aa, Artificial Sequence
  Description of Artificial Sequence: Synthetic polypeptide
EKKDETQKVQMKFLVEQMRRPDFMDALQGFLSPLNPAHQL

SEQ ID NO: 4551 - protein, 40 aa, Artificial Sequence
  Description of Artificial Sequence: Synthetic polypeptide
KKDETQKVQMKFLVEQMRRPDFMDALQGFLSPLNPAHQLG

SEQ ID NO: 4552 - protein, 40 aa, Artificial Sequence
  Description of Artificial Sequence: Synthetic polypeptide
IRIMENIWQNQGLDLRMLPYGCLSIGDCVGLIEVVRNSHT

SEQ ID NO: 4553 - protein, 40 aa, Artificial Sequence
  Description of Artificial Sequence: Synthetic polypeptide
ENIWQNQGLDLRMLPYGCLSIGDCVGLIEVVRNSHTIMQI

SEQ ID NO: 4554 - protein, 40 aa, Artificial Sequence
  Description of Artificial Sequence: Synthetic polypeptide
WLKDKNKGEIYDAAIDLFTRSCAGYCVATFILGIGDRHNS

SEQ ID NO: 4555 - protein, 40 aa, Artificial Sequence
  Description of Artificial Sequence: Synthetic polypeptide
VKDDGQLFHIDFGHFLDHKKKKFGYKRERVPFVLTQDFLI

SEQ ID NO: 4556 - protein, 40 aa, Artificial Sequence
  Description of Artificial Sequence: Synthetic polypeptide
MFHIDFGHFLDHKKKKFGYKRERVPFVLTQDFLIVISKGA

SEQ ID NO: 4557 - protein, 40 aa, Artificial Sequence
  Description of Artificial Sequence: Synthetic polypeptide
DHKKKKFGYKRERVPFVLTQDFLIVISKGAQECTKTREFE

SEQ ID NO: 4558 - protein, 40 aa, Artificial Sequence
  Description of Artificial Sequence: Synthetic polypeptide
KKKFGYKRERVPFVLTQDFLIVISKGAQECTKTREFERFQ

SEQ ID NO: 4559 - protein, 40 aa, Artificial Sequence
  Description of Artificial Sequence: Synthetic polypeptide
KKFGYKRERVPFVLTQDFLIVISKGAQECTKTREFERFQE

SEQ ID NO: 4560 - protein, 40 aa, Artificial Sequence
  Description of Artificial Sequence: Synthetic polypeptide
ERVPFVLTQDFLIVISKGAQECTKTREFERFQEMCYKAYL

SEQ ID NO: 4561 - protein, 40 aa, Artificial Sequence
  Description of Artificial Sequence: Synthetic polypeptide
VLTQDFLIVISKGAQECTKTREFERFQEMCYKAYLAIRQH

SEQ ID NO: 4562 - protein, 40 aa, Artificial Sequence
  Description of Artificial Sequence: Synthetic polypeptide
QEMCYKAYLAIRQHANLFINLFSMMLGSGMPELQSFDDIA

SEQ ID NO: 4563 - protein, 40 aa, Artificial Sequence
  Description of Artificial Sequence: Synthetic polypeptide
ANLFINLFSMMLGSGMPELQSFDDIAYIRKTLALDKTEQE

SEQ ID NO: 4564 - protein, 40 aa, Artificial Sequence
  Description of Artificial Sequence: Synthetic polypeptide
LGSGMPELQSFDDIAYIRKTLALDKTEQEALEYFMKQMND

SEQ ID NO: 4565 - protein, 40 aa, Artificial Sequence
  Description of Artificial Sequence: Synthetic polypeptide
SGMPELQSFDDIAYIRKTLALDKTEQEALEYFMKQMNDAH

SEQ ID NO: 4566 - protein, 40 aa, Artificial Sequence
  Description of Artificial Sequence: Synthetic polypeptide
EVQSSEEYIQLLKKLIRSPSIPHQYWLTLQYLLKHFFKLS

SEQ ID NO: 4567 - protein, 40 aa, Artificial Sequence
  Description of Artificial Sequence: Synthetic polypeptide
LIRSPSIPHQYWLTLQYLLKHFFKLSQTSSKNLLNARVLS

SEQ ID NO: 4568 - protein, 40 aa, Artificial Sequence
  Description of Artificial Sequence: Synthetic polypeptide
FKLSQTSSKNLLNARVLSEIFSPMLFRFSAASSDNTENLI

SEQ ID NO: 4569 - protein, 40 aa, Artificial Sequence
  Description of Artificial Sequence: Synthetic polypeptide
SKNLLNARVLSEIFSPMLFRFSAASSDNTENLIKVIEILI

SEQ ID NO: 4570 - protein, 40 aa, Artificial Sequence
  Description of Artificial Sequence: Synthetic polypeptide
KNLLNARVLSEIFSPMLFRFSAASSDNTENLIKVIEILIS

SEQ ID NO: 4571 - protein, 40 aa, Artificial Sequence
  Description of Artificial Sequence: Synthetic polypeptide
NARVLSEIFSPMLFRFSAASSDNTENLIKVIEILISTEWN

SEQ ID NO: 4572 - protein, 40 aa, Artificial Sequence
  Description of Artificial Sequence: Synthetic polypeptide
ARVLSEIFSPMLFRFSAASSDNTENLIKVIEILISTEWNE

SEQ ID NO: 4573 - protein, 40 aa, Artificial Sequence
  Description of Artificial Sequence: Synthetic polypeptide
VLSEIFSPMLFRFSAASSDNTENLIKVIEILISTEWNERQ

SEQ ID NO: 4574 - protein, 40 aa, Artificial Sequence
  Description of Artificial Sequence: Synthetic polypeptide
NEKLRDTADGTFLVRDASTKMHGDYTLTLRKGGNNKLIKI

SEQ ID NO: 4575 - protein, 40 aa, Artificial Sequence
  Description of Artificial Sequence: Synthetic polypeptide
TLTLRKGGNNKLIKIFHRDGKYGFSDPLTFSSVVELINHY

SEQ ID NO: 4576 - protein, 40 aa, Artificial Sequence
  Description of Artificial Sequence: Synthetic polypeptide
KYGFSDPLTFSSVVELINHYRNESLAQYNPKLDVKLLYPV

SEQ ID NO: 4577 - protein, 40 aa, Artificial Sequence
  Description of Artificial Sequence: Synthetic polypeptide
RNESLAQYNPKLDVKLLYPVSKYQQDQVVKEDNIEAVGKK

SEQ ID NO: 4578 - protein, 40 aa, Artificial Sequence
  Description of Artificial Sequence: Synthetic polypeptide
ESLAQYNPKLDVKLLYPVSKYQQDQVVKEDNIEAVGKKLH

SEQ ID NO: 4579 - protein, 40 aa, Artificial Sequence
  Description of Artificial Sequence: Synthetic polypeptide
AQYNPKLDVKLLYPVSKYQQDQVVKEDNIEAVGKKLHEYN

SEQ ID NO: 4580 - protein, 40 aa, Artificial Sequence
  Description of Artificial Sequence: Synthetic polypeptide
MDVKLLYPVSKYQQDQVVKEDNIEAVGKKLHEYNTQFQEK

SEQ ID NO: 4581 - protein, 40 aa, Artificial Sequence
  Description of Artificial Sequence: Synthetic polypeptide
KLLYPVSKYQQDQVVKEDNIEAVGKKLHEYNTQFQEKSRE

SEQ ID NO: 4582 - protein, 40 aa, Artificial Sequence
  Description of Artificial Sequence: Synthetic polypeptide
LLYPVSKYQQDQVVKEDNIEAVGKKLHEYNTQFQEKSREY

SEQ ID NO: 4583 - protein, 40 aa, Artificial Sequence
  Description of Artificial Sequence: Synthetic polypeptide
PVSKYQQDQVVKEDNIEAVGKKLHEYNTQFQEKSREYDRL

SEQ ID NO: 4584 - protein, 40 aa, Artificial Sequence
  Description of Artificial Sequence: Synthetic polypeptide
QQDQVVKEDNIEAVGKKLHEYNTQFQEKSREYDRLYEEYT

SEQ ID NO: 4585 - protein, 40 aa, Artificial Sequence
  Description of Artificial Sequence: Synthetic polypeptide
QDQVVKEDNIEAVGKKLHEYNTQFQEKSREYDRLYEEYTR

SEQ ID NO: 4586 - protein, 40 aa, Artificial Sequence
  Description of Artificial Sequence: Synthetic polypeptide
DQVVKEDNIEAVGKKLHEYNTQFQEKSREYDRLYEEYTRT

SEQ ID NO: 4587 - protein, 40 aa, Artificial Sequence
  Description of Artificial Sequence: Synthetic polypeptide
QVVKEDNIEAVGKKLHEYNTQFQEKSREYDRLYEEYTRTS

SEQ ID NO: 4588 - protein, 40 aa, Artificial Sequence
  Description of Artificial Sequence: Synthetic polypeptide
VKEDNIEAVGKKLHEYNTQFQEKSREYDRLYEEYTRTSQE

SEQ ID NO: 4589 - protein, 40 aa, Artificial Sequence
  Description of Artificial Sequence: Synthetic polypeptide
KEDNIEAVGKKLHEYNTQFQEKSREYDRLYEEYTRTSQEI

SEQ ID NO: 4590 - protein, 40 aa, Artificial Sequence
  Description of Artificial Sequence: Synthetic polypeptide
EDNIEAVGKKLHEYNTQFQEKSREYDRLYEEYTRTSQEIQ

SEQ ID NO: 4591 - protein, 40 aa, Artificial Sequence
  Description of Artificial Sequence: Synthetic polypeptide
NIEAVGKKLHEYNTQFQEKSREYDRLYEEYTRTSQEIQMK

SEQ ID NO: 4592 - protein, 40 aa, Artificial Sequence
  Description of Artificial Sequence: Synthetic polypeptide
EAVGKKLHEYNTQFQEKSREYDRLYEEYTRTSQEIQMKRT

SEQ ID NO: 4593 - protein, 40 aa, Artificial Sequence
  Description of Artificial Sequence: Synthetic polypeptide
VGKKLHEYNTQFQEKSREYDRLYEEYTRTSQEIQMKRTAI

SEQ ID NO: 4594 - protein, 40 aa, Artificial Sequence
  Description of Artificial Sequence: Synthetic polypeptide
TSQEIQMKRTAIEAFNETIKIFEEQCQTQERYSKEYIEKF

SEQ ID NO: 4595 - protein, 40 aa, Artificial Sequence
  Description of Artificial Sequence: Synthetic polypeptide
SQEIQMKRTAIEAFNETIKIFEEQCQTQERYSKEYIEKFK

SEQ ID NO: 4596 - protein, 40 aa, Artificial Sequence
  Description of Artificial Sequence: Synthetic polypeptide
IQMKRTAIEAFNETIKIFEEQCQTQERYSKEYIEKFKREG

SEQ ID NO: 4597 - protein, 40 aa, Artificial Sequence
  Description of Artificial Sequence: Synthetic polypeptide
RTAIEAFNETIKIFEEQCQTQERYSKEYIEKFKREGNEKE

SEQ ID NO: 4598 - protein, 40 aa, Artificial Sequence
  Description of Artificial Sequence: Synthetic polypeptide
AIEAFNETIKIFEEQCQTQERYSKEYIEKFKREGNEKEIQ

SEQ ID NO: 4599 - protein, 40 aa, Artificial Sequence
  Description of Artificial Sequence: Synthetic polypeptide
AFNETIKIFEEQCQTQERYSKEYIEKFKREGNEKEIQRIM

SEQ ID NO: 4600 - protein, 40 aa, Artificial Sequence
  Description of Artificial Sequence: Synthetic polypeptide
NETIKIFEEQCQTQERYSKEYIEKFKREGNEKEIQRIMHN

SEQ ID NO: 4601 - protein, 40 aa, Artificial Sequence
  Description of Artificial Sequence: Synthetic polypeptide
TIKIFEEQCQTQERYSKEYIEKFKREGNEKEIQRIMHNYD

SEQ ID NO: 4602 - protein, 40 aa, Artificial Sequence
  Description of Artificial Sequence: Synthetic polypeptide
IKIFEEQCQTQERYSKEYIEKFKREGNEKEIQRIMHNYDK

SEQ ID NO: 4603 - protein, 40 aa, Artificial Sequence
  Description of Artificial Sequence: Synthetic polypeptide
KIFEEQCQTQERYSKEYIEKFKREGNEKEIQRIMHNYDKL

SEQ ID NO: 4604 - protein, 40 aa, Artificial Sequence
  Description of Artificial Sequence: Synthetic polypeptide
GNEKEIQRIMHNYDKLKSRISEIIDSRRRLEEDLKKQAAE

SEQ ID NO: 4605 - protein, 40 aa, Artificial Sequence
  Description of Artificial Sequence: Synthetic polypeptide
NEKEIQRIMHNYDKLKSRISEIIDSRRRLEEDLKKQAAEY

SEQ ID NO: 4606 - protein, 40 aa, Artificial Sequence
  Description of Artificial Sequence: Synthetic polypeptide
EIQRIMHNYDKLKSRISEIIDSRRRLEEDLKKQAAEYREI

SEQ ID NO: 4607 - protein, 40 aa, Artificial Sequence
  Description of Artificial Sequence: Synthetic polypeptide
MHNYDKLKSRISEIIDSRRRLEEDLKKQAAEYREIDKRMN

SEQ ID NO: 4608 - protein, 40 aa, Artificial Sequence
  Description of Artificial Sequence: Synthetic polypeptide
RRRLEEDLKKQAAEYREIDKRMNSIKPDLIQLRKTRDQYL

SEQ ID NO: 4609 - protein, 40 aa, Artificial Sequence
  Description of Artificial Sequence: Synthetic polypeptide
RRWFHPNITGVEAENLLLTRGVDGSFLARPSKSNPGDFTL

SEQ ID NO: 4610 - protein, 40 aa, Artificial Sequence
  Description of Artificial Sequence: Synthetic polypeptide
LSVRRNGAVTHIKIQNTGDYYDLYGGEKFATLAELVQYYM

SEQ ID NO: 4611 - protein, 40 aa, Artificial Sequence
  Description of Artificial Sequence: Synthetic polypeptide
ELKYPLNCADPTSERWFHGHLSGKEAEKLLTEKGKHGSFL

SEQ ID NO: 4612 - protein, 40 aa, Artificial Sequence
  Description of Artificial Sequence: Synthetic polypeptide
VGGGERFDSLTDLVEHYKKNPMVETLGTVLQLKQPLNTTR

SEQ ID NO: 4613 - protein, 40 aa, Artificial Sequence
  Description of Artificial Sequence: Synthetic polypeptide
RINAAEIESRVRELSKLAETTDKVKQGFWEEFETLQQQEC

SEQ ID NO: 4614 - protein, 40 aa, Artificial Sequence
  Description of Artificial Sequence: Synthetic polypeptide
INAAEIESRVRELSKLAETTDKVKQGFWEEFETLQQQECK

SEQ ID NO: 4615 - protein, 40 aa, Artificial Sequence
  Description of Artificial Sequence: Synthetic polypeptide
SKLAETTDKVKQGFWEEFETLQQQECKLLYSRKEGQRQEN

SEQ ID NO: 4616 - protein, 40 aa, Artificial Sequence
  Description of Artificial Sequence: Synthetic polypeptide
KQGFWEEFETLQQQECKLLYSRKEGQRQENKNKNRYKNIL

SEQ ID NO: 4617 - protein, 40 aa, Artificial Sequence
  Description of Artificial Sequence: Synthetic polypeptide
ETLQQQECKLLYSRKEGQRQENKNKNRYKNILPFDHTRVV

SEQ ID NO: 4618 - protein, 40 aa, Artificial Sequence
  Description of Artificial Sequence: Synthetic polypeptide
LQQQECKLLYSRKEGQRQENKNKNRYKNILPFDHTRVVLH

SEQ ID NO: 4619 - protein, 40 aa, Artificial Sequence
  Description of Artificial Sequence: Synthetic polypeptide
FWRMVFQENSRVIVMTTKEVERGKSKCVKYWPDEYALKEY

SEQ ID NO: 4620 - protein, 40 aa, Artificial Sequence
  Description of Artificial Sequence: Synthetic polypeptide
VFQENSRVIVMTTKEVERGKSKCVKYWPDEYALKEYGVMR

SEQ ID NO: 4621 - protein, 40 aa, Artificial Sequence
  Description of Artificial Sequence: Synthetic polypeptide
KSKCVKYWPDEYALKEYGVMRVRNVKESAAHDYTLRELKL

SEQ ID NO: 4622 - protein, 40 aa, Artificial Sequence
  Description of Artificial Sequence: Synthetic polypeptide
WPDEYALKEYGVMRVRNVKESAAHDYTLRELKLSKVGQGN

SEQ ID NO: 4623 - protein, 40 aa, Artificial Sequence
  Description of Artificial Sequence: Synthetic polypeptide
YALKEYGVMRVRNVKESAAHDYTLRELKLSKVGQGNTERT

SEQ ID NO: 4624 - protein, 40 aa, Artificial Sequence
  Description of Artificial Sequence: Synthetic polypeptide
RVRNVKESAAHDYTLRELKLSKVGQGNTERTVWQYHFRTW

SEQ ID NO: 4625 - protein, 40 aa, Artificial Sequence
  Description of Artificial Sequence: Synthetic polypeptide
HKQESIMDAGPVVVHCSAGIGRTGTFIVIDILIDIIREKG

SEQ ID NO: 4626 - protein, 40 aa, Artificial Sequence
  Description of Artificial Sequence: Synthetic polypeptide
RSQRSGMVQTEAQYRFIYMAVQHYIETLQRRIEEEQKSKR

SEQ ID NO: 4627 - protein, 40 aa, Artificial Sequence
  Description of Artificial Sequence: Synthetic polypeptide
ELAFETVLKEIFAKVSKQRQNSIRTNAITLGSAQAGQEPG

SEQ ID NO: 4628 - protein, 40 aa, Artificial Sequence
  Description of Artificial Sequence: Synthetic polypeptide
QAIKCVVVGDGAVGKTCLLISYTTNAFPGEYIPTVFDNYS

SEQ ID NO: 4629 - protein, 40 aa, Artificial Sequence
  Description of Artificial Sequence: Synthetic polypeptide
VMVDGKPVNLGLWDTAGQEDYDRLRPLSYPQTVGETYGKD

SEQ ID NO: 4630 - protein, 40 aa, Artificial Sequence
  Description of Artificial Sequence: Synthetic polypeptide
KPVNLGLWDTAGQEDYDRLRPLSYPQTVGETYGKDITSRG

SEQ ID NO: 4631 - protein, 40 aa, Artificial Sequence
  Description of Artificial Sequence: Synthetic polypeptide
NLGLWDTAGQEDYDRLRPLSYPQTVGETYGKDITSRGKDK

SEQ ID NO: 4632 - protein, 40 aa, Artificial Sequence
  Description of Artificial Sequence: Synthetic polypeptide
TAGQEDYDRLRPLSYPQTVGETYGKDITSRGKDKPIADVF

SEQ ID NO: 4633 - protein, 40 aa, Artificial Sequence
  Description of Artificial Sequence: Synthetic polypeptide
GQEDYDRLRPLSYPQTVGETYGKDITSRGKDKPIADVFLI

SEQ ID NO: 4634 - protein, 40 aa, Artificial Sequence
  Description of Artificial Sequence: Synthetic polypeptide
DYDRLRPLSYPQTVGETYGKDITSRGKDKPIADVFLICFS

SEQ ID NO: 4635 - protein, 40 aa, Artificial Sequence
  Description of Artificial Sequence: Synthetic polypeptide
RPLSYPQTVGETYGKDITSRGKDKPIADVFLICFSLVSPA

SEQ ID NO: 4636 - protein, 40 aa, Artificial Sequence
  Description of Artificial Sequence: Synthetic polypeptide
LSYPQTVGETYGKDITSRGKDKPIADVFLICFSLVSPASF

SEQ ID NO: 4637 - protein, 40 aa, Artificial Sequence
  Description of Artificial Sequence: Synthetic polypeptide
SYPQTVGETYGKDITSRGKDKPIADVFLICFSLVSPASFE

SEQ ID NO: 4638 - protein, 40 aa, Artificial Sequence
  Description of Artificial Sequence: Synthetic polypeptide
TVGETYGKDITSRGKDKPIADVFLICFSLVSPASFENVRA

SEQ ID NO: 4639 - protein, 40 aa, Artificial Sequence
  Description of Artificial Sequence: Synthetic polypeptide
TYGKDITSRGKDKPIADVFLICFSLVSPASFENVRAKWYP

SEQ ID NO: 4640 - protein, 40 aa, Artificial Sequence
  Description of Artificial Sequence: Synthetic polypeptide
KPIADVFLICFSLVSPASFENVRAKWYPEVRHHCPNTPII

SEQ ID NO: 4641 - protein, 40 aa, Artificial Sequence
  Description of Artificial Sequence: Synthetic polypeptide
SKTSNTIRVFLPNKQRTVVNVRNGMSLHDCLMKALKVRGL

SEQ ID NO: 4642 - protein, 40 aa, Artificial Sequence
  Description of Artificial Sequence: Synthetic polypeptide
VRNGMSLHDCLMKALKVRGLQPECCAVFRLLHEHKGKKAR

SEQ ID NO: 4643 - protein, 40 aa, Artificial Sequence
  Description of Artificial Sequence: Synthetic polypeptide
NGMSLHDCLMKALKVRGLQPECCAVFRLLHEHKGKKARLD

SEQ ID NO: 4644 - protein, 40 aa, Artificial Sequence
  Description of Artificial Sequence: Synthetic polypeptide
GMSLHDCLMKALKVRGLQPECCAVFRLLHEHKGKKARLDW

SEQ ID NO: 4645 - protein, 40 aa, Artificial Sequence
  Description of Artificial Sequence: Synthetic polypeptide
MSLHDCLMKALKVRGLQPECCAVFRLLHEHKGKKARLDWN

SEQ ID NO: 4646 - protein, 40 aa, Artificial Sequence
  Description of Artificial Sequence: Synthetic polypeptide
SLHDCLMKALKVRGLQPECCAVFRLLHEHKGKKARLDWNT

SEQ ID NO: 4647 - protein, 40 aa, Artificial Sequence
  Description of Artificial Sequence: Synthetic polypeptide
CLMKALKVRGLQPECCAVFRLLHEHKGKKARLDWNTDAAS

SEQ ID NO: 4648 - protein, 40 aa, Artificial Sequence
  Description of Artificial Sequence: Synthetic polypeptide
LKVRGLQPECCAVFRLLHEHKGKKARLDWNTDAASLIGEE

SEQ ID NO: 4649 - protein, 40 aa, Artificial Sequence
  Description of Artificial Sequence: Synthetic polypeptide
RGLQPECCAVFRLLHEHKGKKARLDWNTDAASLIGEELQV

SEQ ID NO: 4650 - protein, 40 aa, Artificial Sequence
  Description of Artificial Sequence: Synthetic polypeptide
QPECCAVFRLLHEHKGKKARLDWNTDAASLIGEELQVDFL

SEQ ID NO: 4651 - protein, 40 aa, Artificial Sequence
  Description of Artificial Sequence: Synthetic polypeptide
MFPNSTIGDSGVPALPSLTMRRMRESVSRMPVSSQHRYST

SEQ ID NO: 4652 - protein, 40 aa, Artificial Sequence
  Description of Artificial Sequence: Synthetic polypeptide
SSSPNNLSPTGWSQPKTPVPAQRERAPVSGTQEKNKIRPR

SEQ ID NO: 4653 - protein, 40 aa, Artificial Sequence
  Description of Artificial Sequence: Synthetic polypeptide
NRDQIIFMVGRGYASPDLSKLYKNCPKAMKRLVADCVKKV

SEQ ID NO: 4654 - protein, 40 aa, Artificial Sequence
  Description of Artificial Sequence: Synthetic polypeptide
SPDLSKLYKNCPKAMKRLVADCVKKVKEERPLFPQILSSI

SEQ ID NO: 4655 - protein, 40 aa, Artificial Sequence
  Description of Artificial Sequence: Synthetic polypeptide
IPLTAPPTNQWYHGKLDRTIAEERLRQAGKSGSYLIRESD

SEQ ID NO: 4656 - protein, 40 aa, Artificial Sequence
  Description of Artificial Sequence: Synthetic polypeptide
HGKLDRTIAEERLRQAGKSGSYLIRESDRRPGSFVLSFLS

SEQ ID NO: 4657 - protein, 40 aa, Artificial Sequence
  Description of Artificial Sequence: Synthetic polypeptide
DRTIAEERLRQAGKSGSYLIRESDRRPGSFVLSFLSQMNV

SEQ ID NO: 4658 - protein, 40 aa, Artificial Sequence
  Description of Artificial Sequence: Synthetic polypeptide
EERLRQAGKSGSYLIRESDRRPGSFVLSFLSQMNVVNHFR

SEQ ID NO: 4659 - protein, 40 aa, Artificial Sequence
  Description of Artificial Sequence: Synthetic polypeptide
RQAGKSGSYLIRESDRRPGSFVLSFLSQMNVVNHFRIIAM

SEQ ID NO: 4660 - protein, 40 aa, Artificial Sequence
  Description of Artificial Sequence: Synthetic polypeptide
AGKSGSYLIRESDRRPGSFVLSFLSQMNVVNHFRIIAMCG

SEQ ID NO: 4661 - protein, 40 aa, Artificial Sequence
  Description of Artificial Sequence: Synthetic polypeptide
SGSYLIRESDRRPGSFVLSFLSQMNVVNHFRIIAMCGDYY

SEQ ID NO: 4662 - protein, 40 aa, Artificial Sequence
  Description of Artificial Sequence: Synthetic polypeptide
YLIRESDRRPGSFVLSFLSQMNVVNHFRIIAMCGDYYIGG

SEQ ID NO: 4663 - protein, 40 aa, Artificial Sequence
  Description of Artificial Sequence: Synthetic polypeptide
LIRESDRRPGSFVLSFLSQMNVVNHFRIIAMCGDYYIGGR

SEQ ID NO: 4664 - protein, 40 aa, Artificial Sequence
  Description of Artificial Sequence: Synthetic polypeptide
ESDRRPGSFVLSFLSQMNVVNHFRIIAMCGDYYIGGRRFS

SEQ ID NO: 4665 - protein, 40 aa, Artificial Sequence
  Description of Artificial Sequence: Synthetic polypeptide
RRPGSFVLSFLSQMNVVNHFRIIAMCGDYYIGGRRFSSLS

SEQ ID NO: 4666 - protein, 40 aa, Artificial Sequence
  Description of Artificial Sequence: Synthetic polypeptide
RPGSFVLSFLSQMNVVNHFRIIAMCGDYYIGGRRFSSLSD

SEQ ID NO: 4667 - protein, 40 aa, Artificial Sequence
  Description of Artificial Sequence: Synthetic polypeptide
VLSFLSQMNVVNHFRIIAMCGDYYIGGRRFSSLSDLIGYY

SEQ ID NO: 4668 - protein, 40 aa, Artificial Sequence
  Description of Artificial Sequence: Synthetic polypeptide
NVVNHFRIIAMCGDYYIGGRRFSSLSDLIGYYSHVSCLLK

SEQ ID NO: 4669 - protein, 40 aa, Artificial Sequence
  Description of Artificial Sequence: Synthetic polypeptide
IIAMCGDYYIGGRRFSSLSDLIGYYSHVSCLLKGEKLLYP

SEQ ID NO: 4670 - protein, 40 aa, Artificial Sequence
  Description of Artificial Sequence: Synthetic polypeptide
IAMCGDYYIGGRRFSSLSDLIGYYSHVSCLLKGEKLLYPV

SEQ ID NO: 4671 - protein, 40 aa, Artificial Sequence
  Description of Artificial Sequence: Synthetic polypeptide
RRFSSLSDLIGYYSHVSCLLKGEKLLYPVAPPEPVEDRRR

SEQ ID NO: 4672 - protein, 40 aa, Artificial Sequence
  Description of Artificial Sequence: Synthetic polypeptide
RFSSLSDLIGYYSHVSCLLKGEKLLYPVAPPEPVEDRRRV

SEQ ID NO: 4673 - protein, 40 aa, Artificial Sequence
  Description of Artificial Sequence: Synthetic polypeptide
KIWFHGKISKQEAYNLLMTVGQVCSFLVRPSDNTPGDYSL

SEQ ID NO: 4674 - protein, 40 aa, Artificial Sequence
  Description of Artificial Sequence: Synthetic polypeptide
QRFKICPTPNNQFMMGGRYYNSIGDIIDHYRKEQIVEGYY

SEQ ID NO: 4675 - protein, 40 aa, Artificial Sequence
  Description of Artificial Sequence: Synthetic polypeptide
TPNNQFMMGGRYYNSIGDIIDHYRKEQIVEGYYLKEPVPM

SEQ ID NO: 4676 - protein, 40 aa, Artificial Sequence
  Description of Artificial Sequence: Synthetic polypeptide
NNQFMMGGRYYNSIGDIIDHYRKEQIVEGYYLKEPVPMQD

SEQ ID NO: 4677 - protein, 40 aa, Artificial Sequence
  Description of Artificial Sequence: Synthetic polypeptide
NQFMMGGRYYNSIGDIIDHYRKEQIVEGYYLKEPVPMQDQ

SEQ ID NO: 4678 - protein, 40 aa, Artificial Sequence
  Description of Artificial Sequence: Synthetic polypeptide
NDTVDGKEIYNTIRRKTKDAFYKNIVKKGYLLKKGKGKRW

SEQ ID NO: 4679 - protein, 40 aa, Artificial Sequence
  Description of Artificial Sequence: Synthetic polypeptide
TVDGKEIYNTIRRKTKDAFYKNIVKKGYLLKKGKGKRWKN

SEQ ID NO: 4680 - protein, 40 aa, Artificial Sequence
  Description of Artificial Sequence: Synthetic polypeptide
VDGKEIYNTIRRKTKDAFYKNIVKKGYLLKKGKGKRWKNL

SEQ ID NO: 4681 - protein, 40 aa, Artificial Sequence
  Description of Artificial Sequence: Synthetic polypeptide
DGKEIYNTIRRKTKDAFYKNIVKKGYLLKKGKGKRWKNLY

SEQ ID NO: 4682 - protein, 40 aa, Artificial Sequence
  Description of Artificial Sequence: Synthetic polypeptide
KEIYNTIRRKTKDAFYKNIVKKGYLLKKGKGKRWKNLYFI

SEQ ID NO: 4683 - protein, 40 aa, Artificial Sequence
  Description of Artificial Sequence: Synthetic polypeptide
IRRKTKDAFYKNIVKKGYLLKKGKGKRWKNLYFILEGSDA

SEQ ID NO: 4684 - protein, 40 aa, Artificial Sequence
  Description of Artificial Sequence: Synthetic polypeptide
RRKTKDAFYKNIVKKGYLLKKGKGKRWKNLYFILEGSDAQ

SEQ ID NO: 4685 - protein, 40 aa, Artificial Sequence
  Description of Artificial Sequence: Synthetic polypeptide
YKNIVKKGYLLKKGKGKRWKNLYFILEGSDAQLIYFESEK

SEQ ID NO: 4686 - protein, 40 aa, Artificial Sequence
  Description of Artificial Sequence: Synthetic polypeptide
IVKKGYLLKKGKGKRWKNLYFILEGSDAQLIYFESEKRAT

SEQ ID NO: 4687 - protein, 40 aa, Artificial Sequence
  Description of Artificial Sequence: Synthetic polypeptide
VKKGYLLKKGKGKRWKNLYFILEGSDAQLIYFESEKRATK

SEQ ID NO: 4688 - protein, 40 aa, Artificial Sequence
  Description of Artificial Sequence: Synthetic polypeptide
KGYLLKKGKGKRWKNLYFILEGSDAQLIYFESEKRATKPK

SEQ ID NO: 4689 - protein, 40 aa, Artificial Sequence
  Description of Artificial Sequence: Synthetic polypeptide
GYLLKKGKGKRWKNLYFILEGSDAQLIYFESEKRATKPKG

SEQ ID NO: 4690 - protein, 40 aa, Artificial Sequence
  Description of Artificial Sequence: Synthetic polypeptide
YLLKKGKGKRWKNLYFILEGSDAQLIYFESEKRATKPKGL

SEQ ID NO: 4691 - protein, 40 aa, Artificial Sequence
  Description of Artificial Sequence: Synthetic polypeptide
KGKGKRWKNLYFILEGSDAQLIYFESEKRATKPKGLIDLS

SEQ ID NO: 4692 - protein, 40 aa, Artificial Sequence
  Description of Artificial Sequence: Synthetic polypeptide
GKRWKNLYFILEGSDAQLIYFESEKRATKPKGLIDLSVCS

SEQ ID NO: 4693 - protein, 40 aa, Artificial Sequence
  Description of Artificial Sequence: Synthetic polypeptide
RWKNLYFILEGSDAQLIYFESEKRATKPKGLIDLSVCSVY

SEQ ID NO: 4694 - protein, 40 aa, Artificial Sequence
  Description of Artificial Sequence: Synthetic polypeptide
WKNLYFILEGSDAQLIYFESEKRATKPKGLIDLSVCSVYV

SEQ ID NO: 4695 - protein, 40 aa, Artificial Sequence
  Description of Artificial Sequence: Synthetic polypeptide
KNLYFILEGSDAQLIYFESEKRATKPKGLIDLSVCSVYVV

SEQ ID NO: 4696 - protein, 40 aa, Artificial Sequence
  Description of Artificial Sequence: Synthetic polypeptide
NLYFILEGSDAQLIYFESEKRATKPKGLIDLSVCSVYVVH

SEQ ID NO: 4697 - protein, 40 aa, Artificial Sequence
  Description of Artificial Sequence: Synthetic polypeptide
AQLIYFESEKRATKPKGLIDLSVCSVYVVHDSLFGRPNCF

SEQ ID NO: 4698 - protein, 40 aa, Artificial Sequence
  Description of Artificial Sequence: Synthetic polypeptide
LSVCSVYVVHDSLFGRPNCFQIVVQHFSEEHYIFYFAGET

SEQ ID NO: 4699 - protein, 40 aa, Artificial Sequence
  Description of Artificial Sequence: Synthetic polypeptide
PEQAEDWMKGLQAFCNLRKSSPGTSNKRLRQVSSLVLHIE

SEQ ID NO: 4700 - protein, 40 aa, Artificial Sequence
  Description of Artificial Sequence: Synthetic polypeptide
AEDWMKGLQAFCNLRKSSPGTSNKRLRQVSSLVLHIEEAH

SEQ ID NO: 4701 - protein, 40 aa, Artificial Sequence
  Description of Artificial Sequence: Synthetic polypeptide
MKGLQAFCNLRKSSPGTSNKRLRQVSSLVLHIEEAHKLPV

SEQ ID NO: 4702 - protein, 40 aa, Artificial Sequence
  Description of Artificial Sequence: Synthetic polypeptide
GLQAFCNLRKSSPGTSNKRLRQVSSLVLHIEEAHKLPVKH

SEQ ID NO: 4703 - protein, 40 aa, Artificial Sequence
  Description of Artificial Sequence: Synthetic polypeptide
AFCNLRKSSPGTSNKRLRQVSSLVLHIEEAHKLPVKHFTN

SEQ ID NO: 4704 - protein, 40 aa, Artificial Sequence
  Description of Artificial Sequence: Synthetic polypeptide
FCNLRKSSPGTSNKRLRQVSSLVLHIEEAHKLPVKHFTNP

SEQ ID NO: 4705 - protein, 40 aa, Artificial Sequence
  Description of Artificial Sequence: Synthetic polypeptide
CNLRKSSPGTSNKRLRQVSSLVLHIEEAHKLPVKHFTNPY

SEQ ID NO: 4706 - protein, 40 aa, Artificial Sequence
  Description of Artificial Sequence: Synthetic polypeptide
NLRKSSPGTSNKRLRQVSSLVLHIEEAHKLPVKHFTNPYC

SEQ ID NO: 4707 - protein, 40 aa, Artificial Sequence
  Description of Artificial Sequence: Synthetic polypeptide
RKSSPGTSNKRLRQVSSLVLHIEEAHKLPVKHFTNPYCNI

SEQ ID NO: 4708 - protein, 40 aa, Artificial Sequence
  Description of Artificial Sequence: Synthetic polypeptide
SSPGTSNKRLRQVSSLVLHIEEAHKLPVKHFTNPYCNIYL

SEQ ID NO: 4709 - protein, 40 aa, Artificial Sequence
  Description of Artificial Sequence: Synthetic polypeptide
SPGTSNKRLRQVSSLVLHIEEAHKLPVKHFTNPYCNIYLN

SEQ ID NO: 4710 - protein, 40 aa, Artificial Sequence
  Description of Artificial Sequence: Synthetic polypeptide
GTSNKRLRQVSSLVLHIEEAHKLPVKHFTNPYCNIYLNSV

SEQ ID NO: 4711 - protein, 40 aa, Artificial Sequence
  Description of Artificial Sequence: Synthetic polypeptide
TSNKRLRQVSSLVLHIEEAHKLPVKHFTNPYCNIYLNSVQ

SEQ ID NO: 4712 - protein, 40 aa, Artificial Sequence
  Description of Artificial Sequence: Synthetic polypeptide
SNKRLRQVSSLVLHIEEAHKLPVKHFTNPYCNIYLNSVQV

SEQ ID NO: 4713 - protein, 40 aa, Artificial Sequence
  Description of Artificial Sequence: Synthetic polypeptide
NKRLRQVSSLVLHIEEAHKLPVKHFTNPYCNIYLNSVQVA

SEQ ID NO: 4714 - protein, 40 aa, Artificial Sequence
  Description of Artificial Sequence: Synthetic polypeptide
RLRQVSSLVLHIEEAHKLPVKHFTNPYCNIYLNSVQVAKT

SEQ ID NO: 4715 - protein, 40 aa, Artificial Sequence
  Description of Artificial Sequence: Synthetic polypeptide
LRQVSSLVLHIEEAHKLPVKHFTNPYCNIYLNSVQVAKTH

SEQ ID NO: 4716 - protein, 40 aa, Artificial Sequence
  Description of Artificial Sequence: Synthetic polypeptide
VLHIEEAHKLPVKHFTNPYCNIYLNSVQVAKTHAREGQNP

SEQ ID NO: 4717 - protein, 40 aa, Artificial Sequence
  Description of Artificial Sequence: Synthetic polypeptide
PVWSEEFVFDDLPPDINRFEITLSNKTKKSKDPDILFMRC

SEQ ID NO: 4718 - protein, 40 aa, Artificial Sequence
  Description of Artificial Sequence: Synthetic polypeptide
VWSEEFVFDDLPPDINRFEITLSNKTKKSKDPDILFMRCQ

SEQ ID NO: 4719 - protein, 40 aa, Artificial Sequence
  Description of Artificial Sequence: Synthetic polypeptide
WSEEFVFDDLPPDINRFEITLSNKTKKSKDPDILFMRCQL

SEQ ID NO: 4720 - protein, 40 aa, Artificial Sequence
  Description of Artificial Sequence: Synthetic polypeptide
DDLPPDINRFEITLSNKTKKSKDPDILFMRCQLSRLQKGH

SEQ ID NO: 4721 - protein, 40 aa, Artificial Sequence
  Description of Artificial Sequence: Synthetic polypeptide
DLPPDINRFEITLSNKTKKSKDPDILFMRCQLSRLQKGHA

SEQ ID NO: 4722 - protein, 40 aa, Artificial Sequence
  Description of Artificial Sequence: Synthetic polypeptide
PPDINRFEITLSNKTKKSKDPDILFMRCQLSRLQKGHATD

SEQ ID NO: 4723 - protein, 40 aa, Artificial Sequence
  Description of Artificial Sequence: Synthetic polypeptide
PDINRFEITLSNKTKKSKDPDILFMRCQLSRLQKGHATDE

SEQ ID NO: 4724 - protein, 40 aa, Artificial Sequence
  Description of Artificial Sequence: Synthetic polypeptide
DINRFEITLSNKTKKSKDPDILFMRCQLSRLQKGHATDEW

SEQ ID NO: 4725 - protein, 40 aa, Artificial Sequence
  Description of Artificial Sequence: Synthetic polypeptide
FEITLSNKTKKSKDPDILFMRCQLSRLQKGHATDEWFLLS

SEQ ID NO: 4726 - protein, 40 aa, Artificial Sequence
  Description of Artificial Sequence: Synthetic polypeptide
HATDEWFLLSSHIPLKGIEPGSLRVRARYSMEKIMPEEEY

SEQ ID NO: 4727 - protein, 40 aa, Artificial Sequence
  Description of Artificial Sequence: Synthetic polypeptide
SSHIPLKGIEPGSLRVRARYSMEKIMPEEEYSEFKELILQ

SEQ ID NO: 4728 - protein, 40 aa, Artificial Sequence
  Description of Artificial Sequence: Synthetic polypeptide
HIPLKGIEPGSLRVRARYSMEKIMPEEEYSEFKELILQKE

SEQ ID NO: 4729 - protein, 40 aa, Artificial Sequence
  Description of Artificial Sequence: Synthetic polypeptide
LKGIEPGSLRVRARYSMEKIMPEEEYSEFKELILQKELHV

SEQ ID NO: 4730 - protein, 40 aa, Artificial Sequence
  Description of Artificial Sequence: Synthetic polypeptide
EPGSLRVRARYSMEKIMPEEEYSEFKELILQKELHVVYAL

SEQ ID NO: 4731 - protein, 40 aa, Artificial Sequence
  Description of Artificial Sequence: Synthetic polypeptide
YSEFKELILQKELHVVYALSHVCGQDRTLLASILLRIFLH

SEQ ID NO: 4732 - protein, 40 aa, Artificial Sequence
  Description of Artificial Sequence: Synthetic polypeptide
VCGQDRTLLASILLRIFLHEKLESLLLCTLNDREISMEDE

SEQ ID NO: 4733 - protein, 40 aa, Artificial Sequence
  Description of Artificial Sequence: Synthetic polypeptide
TTLASTLMEQYMKATATQFVHHALKDSILKIMESKQSCEL

SEQ ID NO: 4734 - protein, 40 aa, Artificial Sequence
  Description of Artificial Sequence: Synthetic polypeptide
MEQYMKATATQFVHHALKDSILKIMESKQSCELSPSKLEK

SEQ ID NO: 4735 - protein, 40 aa, Artificial Sequence
  Description of Artificial Sequence: Synthetic polypeptide
ILKIMESKQSCELSPSKLEKNEDVNTNLTHLLNILSELVE

SEQ ID NO: 4736 - protein, 40 aa, Artificial Sequence
  Description of Artificial Sequence: Synthetic polypeptide
VNTNLTHLLNILSELVEKIFMASEILPPTLRYIYGCLQKS

SEQ ID NO: 4737 - protein, 40 aa, Artificial Sequence
  Description of Artificial Sequence: Synthetic polypeptide
PTLRYIYGCLQKSVQHKWPTNTTMRTRVVSGFVFLRLICP

SEQ ID NO: 4738 - protein, 40 aa, Artificial Sequence
  Description of Artificial Sequence: Synthetic polypeptide
MIMFLDELGNVPELPDTTEHSRTDLSRDLAALHEICVAHS

SEQ ID NO: 4739 - protein, 40 aa, Artificial Sequence
  Description of Artificial Sequence: Synthetic polypeptide
KIPDHVRERAWLTWEKVSSVDGVLGGYIQKKKELWGICIF

SEQ ID NO: 4740 - protein, 40 aa, Artificial Sequence
  Description of Artificial Sequence: Synthetic polypeptide
ERAWLTWEKVSSVDGVLGGYIQKKKELWGICIFIAAVDLD

SEQ ID NO: 4741 - protein, 40 aa, Artificial Sequence
  Description of Artificial Sequence: Synthetic polypeptide
AWLTWEKVSSVDGVLGGYIQKKKELWGICIFIAAVDLDEM

SEQ ID NO: 4742 - protein, 40 aa, Artificial Sequence
  Description of Artificial Sequence: Synthetic polypeptide
LTWEKVSSVDGVLGGYIQKKKELWGICIFIAAVDLDEMSF

SEQ ID NO: 4743 - protein, 40 aa, Artificial Sequence
  Description of Artificial Sequence: Synthetic polypeptide
VLGGYIQKKKELWGICIFIAAVDLDEMSFTFTELQKNIEI

SEQ ID NO: 4744 - protein, 40 aa, Artificial Sequence
  Description of Artificial Sequence: Synthetic polypeptide
GGYIQKKKELWGICIFIAAVDLDEMSFTFTELQKNIEISV

SEQ ID NO: 4745 - protein, 40 aa, Artificial Sequence
  Description of Artificial Sequence: Synthetic polypeptide
GYIQKKKELWGICIFIAAVDLDEMSFTFTELQKNIEISVH

SEQ ID NO: 4746 - protein, 40 aa, Artificial Sequence
  Description of Artificial Sequence: Synthetic polypeptide
YIQKKKELWGICIFIAAVDLDEMSFTFTELQKNIEISVHK

SEQ ID NO: 4747 - protein, 40 aa, Artificial Sequence
  Description of Artificial Sequence: Synthetic polypeptide
IQKKKELWGICIFIAAVDLDEMSFTFTELQKNIEISVHKF

SEQ ID NO: 4748 - protein, 40 aa, Artificial Sequence
  Description of Artificial Sequence: Synthetic polypeptide
ELWGICIFIAAVDLDEMSFTFTELQKNIEISVHKFFNLLK

SEQ ID NO: 4749 - protein, 40 aa, Artificial Sequence
  Description of Artificial Sequence: Synthetic polypeptide
CIFIAAVDLDEMSFTFTELQKNIEISVHKFFNLLKEIDTS

SEQ ID NO: 4750 - protein, 40 aa, Artificial Sequence
  Description of Artificial Sequence: Synthetic polypeptide
IFIAAVDLDEMSFTFTELQKNIEISVHKFFNLLKEIDTST

SEQ ID NO: 4751 - protein, 40 aa, Artificial Sequence
  Description of Artificial Sequence: Synthetic polypeptide
LFSKLERTCELIYLTQPSSSISTEINSALVLKVSWITFLL

SEQ ID NO: 4752 - protein, 40 aa, Artificial Sequence
  Description of Artificial Sequence: Synthetic polypeptide
ERTCELIYLTQPSSSISTEINSALVLKVSWITFLLAKGEV

SEQ ID NO: 4753 - protein, 40 aa, Artificial Sequence
  Description of Artificial Sequence: Synthetic polypeptide
ELIYLTQPSSSISTEINSALVLKVSWITFLLAKGEVLQME

SEQ ID NO: 4754 - protein, 40 aa, Artificial Sequence
  Description of Artificial Sequence: Synthetic polypeptide
LIYLTQPSSSISTEINSALVLKVSWITFLLAKGEVLQMED

SEQ ID NO: 4755 - protein, 40 aa, Artificial Sequence
  Description of Artificial Sequence: Synthetic polypeptide
IYLTQPSSSISTEINSALVLKVSWITFLLAKGEVLQMEDD

SEQ ID NO: 4756 - protein, 40 aa, Artificial Sequence
  Description of Artificial Sequence: Synthetic polypeptide
YLTQPSSSISTEINSALVLKVSWITFLLAKGEVLQMEDDL

SEQ ID NO: 4757 - protein, 40 aa, Artificial Sequence
  Description of Artificial Sequence: Synthetic polypeptide
SISTEINSALVLKVSWITFLLAKGEVLQMEDDLVISFQLM

SEQ ID NO: 4758 - protein, 40 aa, Artificial Sequence
  Description of Artificial Sequence: Synthetic polypeptide
STEINSALVLKVSWITFLLAKGEVLQMEDDLVISFQLMLC

SEQ ID NO: 4759 - protein, 40 aa, Artificial Sequence
  Description of Artificial Sequence: Synthetic polypeptide
ALVLKVSWITFLLAKGEVLQMEDDLVISFQLMLCVLDYFI

SEQ ID NO: 4760 - protein, 40 aa, Artificial Sequence
  Description of Artificial Sequence: Synthetic polypeptide
LKVSWITFLLAKGEVLQMEDDLVISFQLMLCVLDYFIKLS

SEQ ID NO: 4761 - protein, 40 aa, Artificial Sequence
  Description of Artificial Sequence: Synthetic polypeptide
KVSWITFLLAKGEVLQMEDDLVISFQLMLCVLDYFIKLSP

SEQ ID NO: 4762 - protein, 40 aa, Artificial Sequence
  Description of Artificial Sequence: Synthetic polypeptide
LQMEDDLVISFQLMLCVLDYFIKLSPPMLLKEPYKTAVIP

SEQ ID NO: 4763 - protein, 40 aa, Artificial Sequence
  Description of Artificial Sequence: Synthetic polypeptide
EDDLVISFQLMLCVLDYFIKLSPPMLLKEPYKTAVIPING

SEQ ID NO: 4764 - protein, 40 aa, Artificial Sequence
  Description of Artificial Sequence: Synthetic polypeptide
NRSARIAKQLENDTRIIEVLCKEHECNIDEVKNVYFKNFI

SEQ ID NO: 4765 - protein, 40 aa, Artificial Sequence
  Description of Artificial Sequence: Synthetic polypeptide
RSARIAKQLENDTRIIEVLCKEHECNIDEVKNVYFKNFIP

SEQ ID NO: 4766 - protein, 40 aa, Artificial Sequence
  Description of Artificial Sequence: Synthetic polypeptide
SARIAKQLENDTRIIEVLCKEHECNIDEVKNVYFKNFIPF

SEQ ID NO: 4767 - protein, 40 aa, Artificial Sequence
  Description of Artificial Sequence: Synthetic polypeptide
IAKQLENDTRIIEVLCKEHECNIDEVKNVYFKNFIPFMNS

SEQ ID NO: 4768 - protein, 40 aa, Artificial Sequence
  Description of Artificial Sequence: Synthetic polypeptide
LENDTRIIEVLCKEHECNIDEVKNVYFKNFIPFMNSLGLV

SEQ ID NO: 4769 - protein, 40 aa, Artificial Sequence
  Description of Artificial Sequence: Synthetic polypeptide
ENDTRIIEVLCKEHECNIDEVKNVYFKNFIPFMNSLGLVT

SEQ ID NO: 4770 - protein, 40 aa, Artificial Sequence
  Description of Artificial Sequence: Synthetic polypeptide
DTRIIEVLCKEHECNIDEVKNVYFKNFIPFMNSLGLVTSN

SEQ ID NO: 4771 - protein, 40 aa, Artificial Sequence
  Description of Artificial Sequence: Synthetic polypeptide
TRIIEVLCKEHECNIDEVKNVYFKNFIPFMNSLGLVTSNG

SEQ ID NO: 4772 - protein, 40 aa, Artificial Sequence
  Description of Artificial Sequence: Synthetic polypeptide
IEVLCKEHECNIDEVKNVYFKNFIPFMNSLGLVTSNGLPE

SEQ ID NO: 4773 - protein, 40 aa, Artificial Sequence
  Description of Artificial Sequence: Synthetic polypeptide
EVLCKEHECNIDEVKNVYFKNFIPFMNSLGLVTSNGLPEV

SEQ ID NO: 4774 - protein, 40 aa, Artificial Sequence
  Description of Artificial Sequence: Synthetic polypeptide
CNIDEVKNVYFKNFIPFMNSLGLVTSNGLPEVENLSKRYE

SEQ ID NO: 4775 - protein, 40 aa, Artificial Sequence
  Description of Artificial Sequence: Synthetic polypeptide
VKNVYFKNFIPFMNSLGLVTSNGLPEVENLSKRYEEIYLK

SEQ ID NO: 4776 - protein, 40 aa, Artificial Sequence
  Description of Artificial Sequence: Synthetic polypeptide
KNVYFKNFIPFMNSLGLVTSNGLPEVENLSKRYEEIYLKN

SEQ ID NO: 4777 - protein, 40 aa, Artificial Sequence
  Description of Artificial Sequence: Synthetic polypeptide
NVYFKNFIPFMNSLGLVTSNGLPEVENLSKRYEEIYLKNK

SEQ ID NO: 4778 - protein, 40 aa, Artificial Sequence
  Description of Artificial Sequence: Synthetic polypeptide
VYFKNFIPFMNSLGLVTSNGLPEVENLSKRYEEIYLKNKD

SEQ ID NO: 4779 - protein, 40 aa, Artificial Sequence
  Description of Artificial Sequence: Synthetic polypeptide
PFMNSLGLVTSNGLPEVENLSKRYEEIYLKNKDLDARLFL

SEQ ID NO: 4780 - protein, 40 aa, Artificial Sequence
  Description of Artificial Sequence: Synthetic polypeptide
MNSLGLVTSNGLPEVENLSKRYEEIYLKNKDLDARLFLDH

SEQ ID NO: 4781 - protein, 40 aa, Artificial Sequence
  Description of Artificial Sequence: Synthetic polypeptide
VTSNGLPEVENLSKRYEEIYLKNKDLDARLFLDHDKTLQT

SEQ ID NO: 4782 - protein, 40 aa, Artificial Sequence
  Description of Artificial Sequence: Synthetic polypeptide
TSNGLPEVENLSKRYEEIYLKNKDLDARLFLDHDKTLQTD

SEQ ID NO: 4783 - protein, 40 aa, Artificial Sequence
  Description of Artificial Sequence: Synthetic polypeptide
SNGLPEVENLSKRYEEIYLKNKDLDARLFLDHDKTLQTDS

SEQ ID NO: 4784 - protein, 40 aa, Artificial Sequence
  Description of Artificial Sequence: Synthetic polypeptide
GLPEVENLSKRYEEIYLKNKDLDARLFLDHDKTLQTDSID

SEQ ID NO: 4785 - protein, 40 aa, Artificial Sequence
  Description of Artificial Sequence: Synthetic polypeptide
LPEVENLSKRYEEIYLKNKDLDARLFLDHDKTLQTDSIDS

SEQ ID NO: 4786 - protein, 40 aa, Artificial Sequence
  Description of Artificial Sequence: Synthetic polypeptide
PEVENLSKRYEEIYLKNKDLDARLFLDHDKTLQTDSIDSF

SEQ ID NO: 4787 - protein, 40 aa, Artificial Sequence
  Description of Artificial Sequence: Synthetic polypeptide
EVENLSKRYEEIYLKNKDLDARLFLDHDKTLQTDSIDSFE

SEQ ID NO: 4788 - protein, 40 aa, Artificial Sequence
  Description of Artificial Sequence: Synthetic polypeptide
VENLSKRYEEIYLKNKDLDARLFLDHDKTLQTDSIDSFET

SEQ ID NO: 4789 - protein, 40 aa, Artificial Sequence
  Description of Artificial Sequence: Synthetic polypeptide
NLSKRYEEIYLKNKDLDARLFLDHDKTLQTDSIDSFETQR

SEQ ID NO: 4790 - protein, 40 aa, Artificial Sequence
  Description of Artificial Sequence: Synthetic polypeptide
LSKRYEEIYLKNKDLDARLFLDHDKTLQTDSIDSFETQRT

SEQ ID NO: 4791 - protein, 40 aa, Artificial Sequence
  Description of Artificial Sequence: Synthetic polypeptide
SKRYEEIYLKNKDLDARLFLDHDKTLQTDSIDSFETQRTP

SEQ ID NO: 4792 - protein, 40 aa, Artificial Sequence
  Description of Artificial Sequence: Synthetic polypeptide
KRYEEIYLKNKDLDARLFLDHDKTLQTDSIDSFETQRTPR

SEQ ID NO: 4793 - protein, 40 aa, Artificial Sequence
  Description of Artificial Sequence: Synthetic polypeptide
RYEEIYLKNKDLDARLFLDHDKTLQTDSIDSFETQRTPRK

SEQ ID NO: 4794 - protein, 40 aa, Artificial Sequence
  Description of Artificial Sequence: Synthetic polypeptide
LMMILNSASDQPSENLISYFNNCTVNPKESILKRVKDIGY

SEQ ID NO: 4795 - protein, 40 aa, Artificial Sequence
  Description of Artificial Sequence: Synthetic polypeptide
PSENLISYFNNCTVNPKESILKRVKDIGYIFKEKFAKAVG

SEQ ID NO: 4796 - protein, 40 aa, Artificial Sequence
  Description of Artificial Sequence: Synthetic polypeptide
IGYIFKEKFAKAVGQGCVEIGSQRYKLGVRLYYRVMESML

SEQ ID NO: 4797 - protein, 40 aa, Artificial Sequence
  Description of Artificial Sequence: Synthetic polypeptide
IFKEKFAKAVGQGCVEIGSQRYKLGVRLYYRVMESMLKSE

SEQ ID NO: 4798 - protein, 40 aa, Artificial Sequence
  Description of Artificial Sequence: Synthetic polypeptide
SLLACALEVVMATYSRSTSQNLDSGTDLSFPWILNVLNLK

SEQ ID NO: 4799 - protein, 40 aa, Artificial Sequence
  Description of Artificial Sequence: Synthetic polypeptide
CALEVVMATYSRSTSQNLDSGTDLSFPWILNVLNLKAFDF

SEQ ID NO: 4800 - protein, 40 aa, Artificial Sequence
  Description of Artificial Sequence: Synthetic polypeptide
RSTSQNLDSGTDLSFPWILNVLNLKAFDFYKVIESFIKAE

SEQ ID NO: 4801 - protein, 40 aa, Artificial Sequence
  Description of Artificial Sequence: Synthetic polypeptide
STSQNLDSGTDLSFPWILNVLNLKAFDFYKVIESFIKAEG

SEQ ID NO: 4802 - protein, 40 aa, Artificial Sequence
  Description of Artificial Sequence: Synthetic polypeptide
NLDSGTDLSFPWILNVLNLKAFDFYKVIESFIKAEGNLTR

SEQ ID NO: 4803 - protein, 40 aa, Artificial Sequence
  Description of Artificial Sequence: Synthetic polypeptide
TDLSFPWILNVLNLKAFDFYKVIESFIKAEGNLTREMIKH

SEQ ID NO: 4804 - protein, 40 aa, Artificial Sequence
  Description of Artificial Sequence: Synthetic polypeptide
MSFPWILNVLNLKAFDFYKVIESFIKAEGNLTREMIKHLE

SEQ ID NO: 4805 - protein, 40 aa, Artificial Sequence
  Description of Artificial Sequence: Synthetic polypeptide
SFPWILNVLNLKAFDFYKVIESFIKAEGNLTREMIKHLER

SEQ ID NO: 4806 - protein, 40 aa, Artificial Sequence
  Description of Artificial Sequence: Synthetic polypeptide
FPWILNVLNLKAFDFYKVIESFIKAEGNLTREMIKHLERC

SEQ ID NO: 4807 - protein, 40 aa, Artificial Sequence
  Description of Artificial Sequence: Synthetic polypeptide
PWILNVLNLKAFDFYKVIESFIKAEGNLTREMIKHLERCE

SEQ ID NO: 4808 - protein, 40 aa, Artificial Sequence
  Description of Artificial Sequence: Synthetic polypeptide
ILNVLNLKAFDFYKVIESFIKAEGNLTREMIKHLERCEHR

SEQ ID NO: 4809 - protein, 40 aa, Artificial Sequence
  Description of Artificial Sequence: Synthetic polypeptide
NVLNLKAFDFYKVIESFIKAEGNLTREMIKHLERCEHRIM

SEQ ID NO: 4810 - protein, 40 aa, Artificial Sequence
  Description of Artificial Sequence: Synthetic polypeptide
VLNLKAFDFYKVIESFIKAEGNLTREMIKHLERCEHRIME

SEQ ID NO: 4811 - protein, 40 aa, Artificial Sequence
  Description of Artificial Sequence: Synthetic polypeptide
LNLKAFDFYKVIESFIKAEGNLTREMIKHLERCEHRIMES

SEQ ID NO: 4812 - protein, 40 aa, Artificial Sequence
  Description of Artificial Sequence: Synthetic polypeptide
NLKAFDFYKVIESFIKAEGNLTREMIKHLERCEHRIMESL

SEQ ID NO: 4813 - protein, 40 aa, Artificial Sequence
  Description of Artificial Sequence: Synthetic polypeptide
PLKSTSLSLFYKKVYRLAYLRLNTLCERLLSEHPELEHII

SEQ ID NO: 4814 - protein, 40 aa, Artificial Sequence
  Description of Artificial Sequence: Synthetic polypeptide
KDLPHAVQETFKRVLIKEEEYDSIIVFYNSVFMQRLKTNI

SEQ ID NO: 4815 - protein, 40 aa, Artificial Sequence
  Description of Artificial Sequence: Synthetic polypeptide
DLPHAVQETFKRVLIKEEEYDSIIVFYNSVFMQRLKTNIL

SEQ ID NO: 4816 - protein, 40 aa, Artificial Sequence
  Description of Artificial Sequence: Synthetic polypeptide
AVQETFKRVLIKEEEYDSIIVFYNSVFMQRLKTNILQYAS

SEQ ID NO: 4817 - protein, 40 aa, Artificial Sequence
  Description of Artificial Sequence: Synthetic polypeptide
TRPPTLSPIPHIPRSPYKFPSSPLRIPGGNIYISPLKSPY

SEQ ID NO: 4818 - protein, 40 aa, Artificial Sequence
  Description of Artificial Sequence: Synthetic polypeptide
PTPTKMTPRSRILVSIGESFGTSEKFQKINQMVCNSDRVL

SEQ ID NO: 4819 - protein, 40 aa, Artificial Sequence
  Description of Artificial Sequence: Synthetic polypeptide
TPTKMTPRSRILVSIGESFGTSEKFQKINQMVCNSDRVLK

SEQ ID NO: 4820 - protein, 40 aa, Artificial Sequence
  Description of Artificial Sequence: Synthetic polypeptide
TKMTPRSRILVSIGESFGTSEKFQKINQMVCNSDRVLKRS

SEQ ID NO: 4821 - protein, 40 aa, Artificial Sequence
  Description of Artificial Sequence: Synthetic polypeptide
SEKFQKINQMVCNSDRVLKRSAEGSNPPKPLKKLRFDIEG

SEQ ID NO: 4822 - protein, 40 aa, Artificial Sequence
  Description of Artificial Sequence: Synthetic polypeptide
NSDRVLKRSAEGSNPPKPLKKLRFDIEGSDEADGSKHLPG

SEQ ID NO: 4823 - protein, 40 aa, Artificial Sequence
  Description of Artificial Sequence: Synthetic polypeptide
EGSNPPKPLKKLRFDIEGSDEADGSKHLPGESKFQQKLAE

SEQ ID NO: 4824 - protein, 40 aa, Artificial Sequence
  Description of Artificial Sequence: Synthetic polypeptide
TAGQDEYSIFPQTYSIDINGYILVYSVTSIKSFEVIKVIH

SEQ ID NO: 4825 - protein, 40 aa, Artificial Sequence
  Description of Artificial Sequence: Synthetic polypeptide
QDEYSIFPQTYSIDINGYILVYSVTSIKSFEVIKVIHGKL

SEQ ID NO: 4826 - protein, 40 aa, Artificial Sequence
  Description of Artificial Sequence: Synthetic polypeptide
LVYSVTSIKSFEVIKVIHGKLLDMVGKVQIPIMLVGNKKD

SEQ ID NO: 4827 - protein, 40 aa, Artificial Sequence
  Description of Artificial Sequence: Synthetic polypeptide
TSIKSFEVIKVIHGKLLDMVGKVQIPIMLVGNKKDLHMER

SEQ ID NO: 4828 - protein, 40 aa, Artificial Sequence
  Description of Artificial Sequence: Synthetic polypeptide
MHMERVISYEEGKALAESWNAAFLESSAKENQTAVDVFRR

SEQ ID NO: 4829 - protein, 40 aa, Artificial Sequence
  Description of Artificial Sequence: Synthetic polypeptide
AAFLESSAKENQTAVDVFRRIILEAEKMDGAASQGKSSCS

SEQ ID NO: 4830 - protein, 40 aa, Artificial Sequence
  Description of Artificial Sequence: Synthetic polypeptide
CLLIVFSKDQFPEVYVPTVFENYVADIEVDGKQVELALWD

SEQ ID NO: 4831 - protein, 40 aa, Artificial Sequence
  Description of Artificial Sequence: Synthetic polypeptide
SKDQFPEVYVPTVFENYVADIEVDGKQVELALWDTAGQED

SEQ ID NO: 4832 - protein, 40 aa, Artificial Sequence
  Description of Artificial Sequence: Synthetic polypeptide
KWTPEVKHFCPNVPIILVGNKKDLRNDEHTRRELAKMKQE

SEQ ID NO: 4833 - protein, 40 aa, Artificial Sequence
  Description of Artificial Sequence: Synthetic polypeptide
NVPIILVGNKKDLRNDEHTRRELAKMKQEPVKPEEGRDMA

SEQ ID NO: 4834 - protein, 40 aa, Artificial Sequence
  Description of Artificial Sequence: Synthetic polypeptide
RTGEGFLLVFSVTDRGSFEEIYKFQRQILRVKDRDEFPMI

SEQ ID NO: 4835 - protein, 40 aa, Artificial Sequence
  Description of Artificial Sequence: Synthetic polypeptide
GEGFLLVFSVTDRGSFEEIYKFQRQILRVKDRDEFPMILI

SEQ ID NO: 4836 - protein, 40 aa, Artificial Sequence
  Description of Artificial Sequence: Synthetic polypeptide
EEIYKFQRQILRVKDRDEFPMILIGNKADLDHQRQVTQEE

SEQ ID NO: 4837 - protein, 40 aa, Artificial Sequence
  Description of Artificial Sequence: Synthetic polypeptide
EIYKFQRQILRVKDRDEFPMILIGNKADLDHQRQVTQEEG

SEQ ID NO: 4838 - protein, 40 aa, Artificial Sequence
  Description of Artificial Sequence: Synthetic polypeptide
IYKFQRQILRVKDRDEFPMILIGNKADLDHQRQVTQEEGQ

SEQ ID NO: 4839 - protein, 40 aa, Artificial Sequence
  Description of Artificial Sequence: Synthetic polypeptide
QRQILRVKDRDEFPMILIGNKADLDHQRQVTQEEGQQLAR

SEQ ID NO: 4840 - protein, 40 aa, Artificial Sequence
  Description of Artificial Sequence: Synthetic polypeptide
ILRVKDRDEFPMILIGNKADLDHQRQVTQEEGQQLARQLK

SEQ ID NO: 4841 - protein, 40 aa, Artificial Sequence
  Description of Artificial Sequence: Synthetic polypeptide
ILIGNKADLDHQRQVTQEEGQQLARQLKVTYMEASAKIRM

SEQ ID NO: 4842 - protein, 40 aa, Artificial Sequence
  Description of Artificial Sequence: Synthetic polypeptide
KADLDHQRQVTQEEGQQLARQLKVTYMEASAKIRMNVDQA

SEQ ID NO: 4843 - protein, 40 aa, Artificial Sequence
  Description of Artificial Sequence: Synthetic polypeptide
DLDHQRQVTQEEGQQLARQLKVTYMEASAKIRMNVDQAFH

SEQ ID NO: 4844 - protein, 40 aa, Artificial Sequence
  Description of Artificial Sequence: Synthetic polypeptide
DHQRQVTQEEGQQLARQLKVTYMEASAKIRMNVDQAFHEL

SEQ ID NO: 4845 - protein, 40 aa, Artificial Sequence
  Description of Artificial Sequence: Synthetic polypeptide
RQVTQEEGQQLARQLKVTYMEASAKIRMNVDQAFHELVRV

SEQ ID NO: 4846 - protein, 40 aa, Artificial Sequence
  Description of Artificial Sequence: Synthetic polypeptide
TVMAGNDENYSAELRNATAAMKNQVARFNDLRFVGRSGRG

SEQ ID NO: 4847 - protein, 40 aa, Artificial Sequence
  Description of Artificial Sequence: Synthetic polypeptide
DENYSAELRNATAAMKNQVARFNDLRFVGRSGRGKSFTLT

SEQ ID NO: 4848 - protein, 40 aa, Artificial Sequence
  Description of Artificial Sequence: Synthetic polypeptide
HLYYGASAGSYQFSMVGGERSPPRILPPCTNASTGSALLN

SEQ ID NO: 4849 - protein, 40 aa, Artificial Sequence
  Description of Artificial Sequence: Synthetic polypeptide
MYYGASAGSYQFSMVGGERSPPRILPPCTNASTGSALLNP

SEQ ID NO: 4850 - protein, 40 aa, Artificial Sequence
  Description of Artificial Sequence: Synthetic polypeptide
GASAGSYQFSMVGGERSPPRILPPCTNASTGSALLNPSLP

SEQ ID NO: 4851 - protein, 40 aa, Artificial Sequence
  Description of Artificial Sequence: Synthetic polypeptide
KTHEDIEAQIREIQGKKAALDEAQGVGLDSTGYYDQEIYG

SEQ ID NO: 4852 - protein, 40 aa, Artificial Sequence
  Description of Artificial Sequence: Synthetic polypeptide
TKEEREIRQQLAEKAKAGELKVVNGAAASQPPSKRKRRWD

SEQ ID NO: 4853 - protein, 40 aa, Artificial Sequence
  Description of Artificial Sequence: Synthetic polypeptide
SGWAETPRTDRGGDSIGETPTPGASKRKSRWDETPASQMG

SEQ ID NO: 4854 - protein, 40 aa, Artificial Sequence
  Description of Artificial Sequence: Synthetic polypeptide
GWAETPRTDRGGDSIGETPTPGASKRKSRWDETPASQMGG

SEQ ID NO: 4855 - protein, 40 aa, Artificial Sequence
  Description of Artificial Sequence: Synthetic polypeptide
EQLQAWRWEREIDERNRPLSDEELDAMFPEGYKVLPPPAG

SEQ ID NO: 4856 - protein, 40 aa, Artificial Sequence
  Description of Artificial Sequence: Synthetic polypeptide
LQAWRWEREIDERNRPLSDEELDAMFPEGYKVLPPPAGYV

SEQ ID NO: 4857 - protein, 40 aa, Artificial Sequence
  Description of Artificial Sequence: Synthetic polypeptide
WEREIDERNRPLSDEELDAMFPEGYKVLPPPAGYVPIRTP

SEQ ID NO: 4858 - protein, 40 aa, Artificial Sequence
  Description of Artificial Sequence: Synthetic polypeptide
VLPPPAGYVPIRTPARKLTATPTPLGGMTGFHMQTEDRTM

SEQ ID NO: 4859 - protein, 40 aa, Artificial Sequence
  Description of Artificial Sequence: Synthetic polypeptide
SGNLPFLKPDDIQYFDKLLVDVDESTLSPEEQKERKIMKL

SEQ ID NO: 4860 - protein, 40 aa, Artificial Sequence
  Description of Artificial Sequence: Synthetic polypeptide
GNLPFLKPDDIQYFDKLLVDVDESTLSPEEQKERKIMKLL

SEQ ID NO: 4861 - protein, 40 aa, Artificial Sequence
  Description of Artificial Sequence: Synthetic polypeptide
PFLKPDDIQYFDKLLVDVDESTLSPEEQKERKIMKLLLKI

SEQ ID NO: 4862 - protein, 40 aa, Artificial Sequence
  Description of Artificial Sequence: Synthetic polypeptide
FLKPDDIQYFDKLLVDVDESTLSPEEQKERKIMKLLLKIK

SEQ ID NO: 4863 - protein, 40 aa, Artificial Sequence
  Description of Artificial Sequence: Synthetic polypeptide
KPDDIQYFDKLLVDVDESTLSPEEQKERKIMKLLLKIKNG

SEQ ID NO: 4864 - protein, 40 aa, Artificial Sequence
  Description of Artificial Sequence: Synthetic polypeptide
QYFDKLLVDVDESTLSPEEQKERKIMKLLLKIKNGTPPMR

SEQ ID NO: 4865 - protein, 40 aa, Artificial Sequence
  Description of Artificial Sequence: Synthetic polypeptide
EQKERKIMKLLLKIKNGTPPMRKAALRQITDKAREFGAGP

SEQ ID NO: 4866 - protein, 40 aa, Artificial Sequence
  Description of Artificial Sequence: Synthetic polypeptide
QKERKIMKLLLKIKNGTPPMRKAALRQITDKAREFGAGPL

SEQ ID NO: 4867 - protein, 40 aa, Artificial Sequence
  Description of Artificial Sequence: Synthetic polypeptide
KERKIMKLLLKIKNGTPPMRKAALRQITDKAREFGAGPLF

SEQ ID NO: 4868 - protein, 40 aa, Artificial Sequence
  Description of Artificial Sequence: Synthetic polypeptide
ERKIMKLLLKIKNGTPPMRKAALRQITDKAREFGAGPLFN

SEQ ID NO: 4869 - protein, 40 aa, Artificial Sequence
  Description of Artificial Sequence: Synthetic polypeptide
RKIMKLLLKIKNGTPPMRKAALRQITDKAREFGAGPLFNQ

SEQ ID NO: 4870 - protein, 40 aa, Artificial Sequence
  Description of Artificial Sequence: Synthetic polypeptide
KIMKLLLKIKNGTPPMRKAALRQITDKAREFGAGPLFNQI

SEQ ID NO: 4871 - protein, 40 aa, Artificial Sequence
  Description of Artificial Sequence: Synthetic polypeptide
IMKLLLKIKNGTPPMRKAALRQITDKAREFGAGPLFNQIL

SEQ ID NO: 4872 - protein, 40 aa, Artificial Sequence
  Description of Artificial Sequence: Synthetic polypeptide
DKAREFGAGPLFNQILPLLMSPTLEDQERHLLVKVIDRIL

SEQ ID NO: 4873 - protein, 40 aa, Artificial Sequence
  Description of Artificial Sequence: Synthetic polypeptide
AGPLFNQILPLLMSPTLEDQERHLLVKVIDRILYKLDDLV

SEQ ID NO: 4874 - protein, 40 aa, Artificial Sequence
  Description of Artificial Sequence: Synthetic polypeptide
RHLLVKVIDRILYKLDDLVRPYVHKILVVIEPLLIDEDYY

SEQ ID NO: 4875 - protein, 40 aa, Artificial Sequence
  Description of Artificial Sequence: Synthetic polypeptide
DDLVRPYVHKILVVIEPLLIDEDYYARVEGREIISNLAKA

SEQ ID NO: 4876 - protein, 40 aa, Artificial Sequence
  Description of Artificial Sequence: Synthetic polypeptide
KSKKSWQARHTGIKIVQQIAILMGCAILPHLRSLVEIIEH

SEQ ID NO: 4877 - protein, 40 aa, Artificial Sequence
  Description of Artificial Sequence: Synthetic polypeptide
HTGIKIVQQIAILMGCAILPHLRSLVEIIEHGLVDEQQKV

SEQ ID NO: 4878 - protein, 40 aa, Artificial Sequence
  Description of Artificial Sequence: Synthetic polypeptide
TISALAIAALAEAATPYGIESFDSVLKPLWKGIRQHRGKG

SEQ ID NO: 4879 - protein, 40 aa, Artificial Sequence
  Description of Artificial Sequence: Synthetic polypeptide
AEAATPYGIESFDSVLKPLWKGIRQHRGKGLAAFLKAIGY

SEQ ID NO: 4880 - protein, 40 aa, Artificial Sequence
  Description of Artificial Sequence: Synthetic polypeptide
AATPYGIESFDSVLKPLWKGIRQHRGKGLAAFLKAIGYLI

SEQ ID NO: 4881 - protein, 40 aa, Artificial Sequence
  Description of Artificial Sequence: Synthetic polypeptide
GIESFDSVLKPLWKGIRQHRGKGLAAFLKAIGYLIPLMDA

SEQ ID NO: 4882 - protein, 40 aa, Artificial Sequence
  Description of Artificial Sequence: Synthetic polypeptide
ESFDSVLKPLWKGIRQHRGKGLAAFLKAIGYLIPLMDAEY

SEQ ID NO: 4883 - protein, 40 aa, Artificial Sequence
  Description of Artificial Sequence: Synthetic polypeptide
SFDSVLKPLWKGIRQHRGKGLAAFLKAIGYLIPLMDAEYA

SEQ ID NO: 4884 - protein, 40 aa, Artificial Sequence
  Description of Artificial Sequence: Synthetic polypeptide
FDSVLKPLWKGIRQHRGKGLAAFLKAIGYLIPLMDAEYAN

SEQ ID NO: 4885 - protein, 40 aa, Artificial Sequence
  Description of Artificial Sequence: Synthetic polypeptide
KGIRQHRGKGLAAFLKAIGYLIPLMDAEYANYYTREVMLI

SEQ ID NO: 4886 - protein, 40 aa, Artificial Sequence
  Description of Artificial Sequence: Synthetic polypeptide
ILIREFQSPDEEMKKIVLKVVKQCCGTDGVEANYIKTEIL

SEQ ID NO: 4887 - protein, 40 aa, Artificial Sequence
  Description of Artificial Sequence: Synthetic polypeptide
IREFQSPDEEMKKIVLKVVKQCCGTDGVEANYIKTEILPP

SEQ ID NO: 4888 - protein, 40 aa, Artificial Sequence
  Description of Artificial Sequence: Synthetic polypeptide
REFQSPDEEMKKIVLKVVKQCCGTDGVEANYIKTEILPPF

SEQ ID NO: 4889 - protein, 40 aa, Artificial Sequence
  Description of Artificial Sequence: Synthetic polypeptide
IKTEILPPFFKHFWQHRMALDRRNYRQLVDTTVELANKVG

SEQ ID NO: 4890 - protein, 40 aa, Artificial Sequence
  Description of Artificial Sequence: Synthetic polypeptide
KTEILPPFFKHFWQHRMALDRRNYRQLVDTTVELANKVGA

SEQ ID NO: 4891 - protein, 40 aa, Artificial Sequence
  Description of Artificial Sequence: Synthetic polypeptide
ELANKVGAAEIISRIVDDLKDEAEQYRKMVMETIEKIMGN

SEQ ID NO: 4892 - protein, 40 aa, Artificial Sequence
  Description of Artificial Sequence: Synthetic polypeptide
MANKVGAAEIISRIVDDLKDEAEQYRKMVMETIEKIMGNL

SEQ ID NO: 4893 - protein, 40 aa, Artificial Sequence
  Description of Artificial Sequence: Synthetic polypeptide
AAEIISRIVDDLKDEAEQYRKMVMETIEKIMGNLGAADID

SEQ ID NO: 4894 - protein, 40 aa, Artificial Sequence
  Description of Artificial Sequence: Synthetic polypeptide
KDEAEQYRKMVMETIEKIMGNLGAADIDHKLEEQLIDGIL

SEQ ID NO: 4895 - protein, 40 aa, Artificial Sequence
  Description of Artificial Sequence: Synthetic polypeptide
SAKVRQQAADLISRTAVVMKTCQEEKLMGHLGVVLYEYLG

SEQ ID NO: 4896 - protein, 40 aa, Artificial Sequence
  Description of Artificial Sequence: Synthetic polypeptide
EKLMGHLGVVLYEYLGEEYPEVLGSILGALKAIVNVIGMH

SEQ ID NO: 4897 - protein, 40 aa, Artificial Sequence
  Description of Artificial Sequence: Synthetic polypeptide
HEKVQENCIDLVGRIADRGAEYVSAREWMRICFELLELLK

SEQ ID NO: 4898 - protein, 40 aa, Artificial Sequence
  Description of Artificial Sequence: Synthetic polypeptide
SAREWMRICFELLELLKAHKKAIRRATVNTFGYIAKAIGP

SEQ ID NO: 4899 - protein, 40 aa, Artificial Sequence
  Description of Artificial Sequence: Synthetic polypeptide
AHKKAIRRATVNTFGYIAKAIGPHDVLATLLNNLKVQERQ

SEQ ID NO: 4900 - protein, 40 aa, Artificial Sequence
  Description of Artificial Sequence: Synthetic polypeptide
KAIRRATVNTFGYIAKAIGPHDVLATLLNNLKVQERQNRV

SEQ ID NO: 4901 - protein, 40 aa, Artificial Sequence
  Description of Artificial Sequence: Synthetic polypeptide
AKAIGPHDVLATLLNNLKVQERQNRVCTTVAIAIVAETCS

SEQ ID NO: 4902 - protein, 40 aa, Artificial Sequence
  Description of Artificial Sequence: Synthetic polypeptide
CTTVAIAIVAETCSPFTVLPALMNEYRVPELNVQNGVLKS

SEQ ID NO: 4903 - protein, 40 aa, Artificial Sequence
  Description of Artificial Sequence: Synthetic polypeptide
PFTVLPALMNEYRVPELNVQNGVLKSLSFLFEYIGEMGKD

SEQ ID NO: 4904 - protein, 40 aa, Artificial Sequence
  Description of Artificial Sequence: Synthetic polypeptide
TVLPALMNEYRVPELNVQNGVLKSLSFLFEYIGEMGKDYI

SEQ ID NO: 4905 - protein, 40 aa, Artificial Sequence
  Description of Artificial Sequence: Synthetic polypeptide
LPALMNEYRVPELNVQNGVLKSLSFLFEYIGEMGKDYIYA

SEQ ID NO: 4906 - protein, 40 aa, Artificial Sequence
  Description of Artificial Sequence: Synthetic polypeptide
PALMNEYRVPELNVQNGVLKSLSFLFEYIGEMGKDYIYAV

SEQ ID NO: 4907 - protein, 40 aa, Artificial Sequence
  Description of Artificial Sequence: Synthetic polypeptide
ALMNEYRVPELNVQNGVLKSLSFLFEYIGEMGKDYIYAVT

SEQ ID NO: 4908 - protein, 40 aa, Artificial Sequence
  Description of Artificial Sequence: Synthetic polypeptide
LMNEYRVPELNVQNGVLKSLSFLFEYIGEMGKDYIYAVTP

SEQ ID NO: 4909 - protein, 40 aa, Artificial Sequence
  Description of Artificial Sequence: Synthetic polypeptide
MNEYRVPELNVQNGVLKSLSFLFEYIGEMGKDYIYAVTPL

SEQ ID NO: 4910 - protein, 40 aa, Artificial Sequence
  Description of Artificial Sequence: Synthetic polypeptide
MNVQNGVLKSLSFLFEYIGEMGKDYIYAVTPLLEDALMDR

SEQ ID NO: 4911 - protein, 40 aa, Artificial Sequence
  Description of Artificial Sequence: Synthetic polypeptide
NGVLKSLSFLFEYIGEMGKDYIYAVTPLLEDALMDRDLVH

SEQ ID NO: 4912 - protein, 40 aa, Artificial Sequence
  Description of Artificial Sequence: Synthetic polypeptide
LMDRDLVHRQTASAVVQHMSLGVYGFGCEDSLNHLLNYVW

SEQ ID NO: 4913 - protein, 40 aa, Artificial Sequence
  Description of Artificial Sequence: Synthetic polypeptide
DSLNHLLNYVWPNVFETSPHVIQAVMGALEGLRVAIGPCR

SEQ ID NO: 4914 - protein, 40 aa, Artificial Sequence
  Description of Artificial Sequence: Synthetic polypeptide
MNYVWPNVFETSPHVIQAVMGALEGLRVAIGPCRMLQYCL

SEQ ID NO: 4915 - protein, 40 aa, Artificial Sequence
  Description of Artificial Sequence: Synthetic polypeptide
VFETSPHVIQAVMGALEGLRVAIGPCRMLQYCLQGLFHPA

SEQ ID NO: 4916 - protein, 40 aa, Artificial Sequence
  Description of Artificial Sequence: Synthetic polypeptide
SPHVIQAVMGALEGLRVAIGPCRMLQYCLQGLFHPARKVR

SEQ ID NO: 4917 - protein, 40 aa, Artificial Sequence
  Description of Artificial Sequence: Synthetic polypeptide
QAVMGALEGLRVAIGPCRMLQYCLQGLFHPARKVRDVYWK

SEQ ID NO: 4918 - protein, 40 aa, Artificial Sequence
  Description of Artificial Sequence: Synthetic polypeptide
AVMGALEGLRVAIGPCRMLQYCLQGLFHPARKVRDVYWKI

SEQ ID NO: 4919 - protein, 40 aa, Artificial Sequence
  Description of Artificial Sequence: Synthetic polypeptide
VMGALEGLRVAIGPCRMLQYCLQGLFHPARKVRDVYWKIY

SEQ ID NO: 4920 - protein, 40 aa, Artificial Sequence
  Description of Artificial Sequence: Synthetic polypeptide
ALEGLRVAIGPCRMLQYCLQGLFHPARKVRDVYWKIYNSI

SEQ ID NO: 4921 - protein, 40 aa, Artificial Sequence
  Description of Artificial Sequence: Synthetic polypeptide
VAIGPCRMLQYCLQGLFHPARKVRDVYWKIYNSIYIGSQD

SEQ ID NO: 4922 - protein, 40 aa, Artificial Sequence
  Description of Artificial Sequence: Synthetic polypeptide
PCRMLQYCLQGLFHPARKVRDVYWKIYNSIYIGSQDALIA

SEQ ID NO: 4923 - protein, 40 aa, Artificial Sequence
  Description of Artificial Sequence: Synthetic polypeptide
LNRENFPGVSWDSLPDELLLGIFSCLCLPELLKVSGVCKR

SEQ ID NO: 4924 - protein, 40 aa, Artificial Sequence
  Description of Artificial Sequence: Synthetic polypeptide
NRENFPGVSWDSLPDELLLGIFSCLCLPELLKVSGVCKRW

SEQ ID NO: 4925 - protein, 40 aa, Artificial Sequence
  Description of Artificial Sequence: Synthetic polypeptide
ENFPGVSWDSLPDELLLGIFSCLCLPELLKVSGVCKRWYR

SEQ ID NO: 4926 - protein, 40 aa, Artificial Sequence
  Description of Artificial Sequence: Synthetic polypeptide
NFPGVSWDSLPDELLLGIFSCLCLPELLKVSGVCKRWYRL

SEQ ID NO: 4927 - protein, 40 aa, Artificial Sequence
  Description of Artificial Sequence: Synthetic polypeptide
WDSLPDELLLGIFSCLCLPELLKVSGVCKRWYRLASDESL

SEQ ID NO: 4928 - protein, 40 aa, Artificial Sequence
  Description of Artificial Sequence: Synthetic polypeptide
DSLPDELLLGIFSCLCLPELLKVSGVCKRWYRLASDESLW

SEQ ID NO: 4929 - protein, 40 aa, Artificial Sequence
  Description of Artificial Sequence: Synthetic polypeptide
SGVCKRWYRLASDESLWQTLDLTGKNLHPDVTGRLLSQGV

SEQ ID NO: 4930 - protein, 40 aa, Artificial Sequence
  Description of Artificial Sequence: Synthetic polypeptide
TGKNLHPDVTGRLLSQGVIAFRCPRSFMDQPLAEHFSPFR

SEQ ID NO: 4931 - protein, 40 aa, Artificial Sequence
  Description of Artificial Sequence: Synthetic polypeptide
GLRLSDPIVNTLAKNSNLVRLNLSGCSGFSEFALQTLLSS

SEQ ID NO: 4932 - protein, 40 aa, Artificial Sequence
  Description of Artificial Sequence: Synthetic polypeptide
MPFTPPVVKRLLGWKKSAGGSGGAGGGEQNGQEEKWCEKA

SEQ ID NO: 4933 - protein, 40 aa, Artificial Sequence
  Description of Artificial Sequence: Synthetic polypeptide
PFTPPVVKRLLGWKKSAGGSGGAGGGEQNGQEEKWCEKAV

SEQ ID NO: 4934 - protein, 40 aa, Artificial Sequence
  Description of Artificial Sequence: Synthetic polypeptide
SEIWGLSTPNTIDQWDTTGLYSFSEQTRSLDGRLQVSHRK

SEQ ID NO: 4935 - protein, 40 aa, Artificial Sequence
  Description of Artificial Sequence: Synthetic polypeptide
MDDYTHSIPENTNFPAGIEPQSNYIPETPPPGYISEDGET

SEQ ID NO: 4936 - protein, 40 aa, Artificial Sequence
  Description of Artificial Sequence: Synthetic polypeptide
CLGLLSNVNRNATVEMTRRHIGRGVRLYYIGGEVFAECLS

SEQ ID NO: 4937 - protein, 40 aa, Artificial Sequence
  Description of Artificial Sequence: Synthetic polypeptide
RRHIGRGVRLYYIGGEVFAECLSDSAIFVQSPNCNQRYGW

SEQ ID NO: 4938 - protein, 40 aa, Artificial Sequence
  Description of Artificial Sequence: Synthetic polypeptide
TFAKRAIESLVKKLKEKKDELDSLITAITTNGAHPSKCVT

SEQ ID NO: 4939 - protein, 40 aa, Artificial Sequence
  Description of Artificial Sequence: Synthetic polypeptide
VIYARLWRWPDLHKNELKHVKYCQYAFDLKCDSVCVNPYH

SEQ ID NO: 4940 - protein, 40 aa, Artificial Sequence
  Description of Artificial Sequence: Synthetic polypeptide
LWRWPDLHKNELKHVKYCQYAFDLKCDSVCVNPYHYERVV

SEQ ID NO: 4941 - protein, 40 aa, Artificial Sequence
  Description of Artificial Sequence: Synthetic polypeptide
HKNELKHVKYCQYAFDLKCDSVCVNPYHYERVVSPGIDLS

SEQ ID NO: 4942 - protein, 40 aa, Artificial Sequence
  Description of Artificial Sequence: Synthetic polypeptide
KNELKHVKYCQYAFDLKCDSVCVNPYHYERVVSPGIDLSG

SEQ ID NO: 4943 - protein, 40 aa, Artificial Sequence
  Description of Artificial Sequence: Synthetic polypeptide
HPGHYWPVHNELAFQPPISNHPAPEYWCSIAYFEMDVQVG

SEQ ID NO: 4944 - protein, 40 aa, Artificial Sequence
  Description of Artificial Sequence: Synthetic polypeptide
HYWPVHNELAFQPPISNHPAPEYWCSIAYFEMDVQVGETF

SEQ ID NO: 4945 - protein, 40 aa, Artificial Sequence
  Description of Artificial Sequence: Synthetic polypeptide
ELAFQPPISNHPAPEYWCSIAYFEMDVQVGETFKVPSSCP

SEQ ID NO: 4946 - protein, 40 aa, Artificial Sequence
  Description of Artificial Sequence: Synthetic polypeptide
QPPISNHPAPEYWCSIAYFEMDVQVGETFKVPSSCPIVTV

SEQ ID NO: 4947 - protein, 40 aa, Artificial Sequence
  Description of Artificial Sequence: Synthetic polypeptide
PPISNHPAPEYWCSIAYFEMDVQVGETFKVPSSCPIVTVD

SEQ ID NO: 4948 - protein, 40 aa, Artificial Sequence
  Description of Artificial Sequence: Synthetic polypeptide
PAPEYWCSIAYFEMDVQVGETFKVPSSCPIVTVDGYVDPS

SEQ ID NO: 4949 - protein, 40 aa, Artificial Sequence
  Description of Artificial Sequence: Synthetic polypeptide
APEYWCSIAYFEMDVQVGETFKVPSSCPIVTVDGYVDPSG

SEQ ID NO: 4950 - protein, 40 aa, Artificial Sequence
  Description of Artificial Sequence: Synthetic polypeptide
SIAYFEMDVQVGETFKVPSSCPIVTVDGYVDPSGGDRFCL

SEQ ID NO: 4951 - protein, 40 aa, Artificial Sequence
  Description of Artificial Sequence: Synthetic polypeptide
IAYFEMDVQVGETFKVPSSCPIVTVDGYVDPSGGDRFCLG

SEQ ID NO: 4952 - protein, 40 aa, Artificial Sequence
  Description of Artificial Sequence: Synthetic polypeptide
AYFEMDVQVGETFKVPSSCPIVTVDGYVDPSGGDRFCLGQ

SEQ ID NO: 4953 - protein, 40 aa, Artificial Sequence
  Description of Artificial Sequence: Synthetic polypeptide
MDVQVGETFKVPSSCPIVTVDGYVDPSGGDRFCLGQLSNV

SEQ ID NO: 4954 - protein, 40 aa, Artificial Sequence
  Description of Artificial Sequence: Synthetic polypeptide
VQVGETFKVPSSCPIVTVDGYVDPSGGDRFCLGQLSNVHR

SEQ ID NO: 4955 - protein, 40 aa, Artificial Sequence
  Description of Artificial Sequence: Synthetic polypeptide
AIERARLHIGKGVQLECKGEGDVWVRCLSDHAVFVQSYYL

SEQ ID NO: 4956 - protein, 40 aa, Artificial Sequence
  Description of Artificial Sequence: Synthetic polypeptide
ARLHIGKGVQLECKGEGDVWVRCLSDHAVFVQSYYLDREA

SEQ ID NO: 4957 - protein, 40 aa, Artificial Sequence
  Description of Artificial Sequence: Synthetic polypeptide
KGVQLECKGEGDVWVRCLSDHAVFVQSYYLDREAGRAPGD

SEQ ID NO: 4958 - protein, 40 aa, Artificial Sequence
  Description of Artificial Sequence: Synthetic polypeptide
GEGDVWVRCLSDHAVFVQSYYLDREAGRAPGDAVHKIYPS

SEQ ID NO: 4959 - protein, 40 aa, Artificial Sequence
  Description of Artificial Sequence: Synthetic polypeptide
PSAYIKVFDLRQCHRQMQQQAATAQAAAAAQAAAVAGNIP

SEQ ID NO: 4960 - protein, 40 aa, Artificial Sequence
  Description of Artificial Sequence: Synthetic polypeptide
RAVRSLLRSHYREVLPLATFVRRLGPQGWRLVQRGDPAAF

SEQ ID NO: 4961 - protein, 40 aa, Artificial Sequence
  Description of Artificial Sequence: Synthetic polypeptide
REVLPLATFVRRLGPQGWRLVQRGDPAAFRALVAQCLVCV

SEQ ID NO: 4962 - protein, 40 aa, Artificial Sequence
  Description of Artificial Sequence: Synthetic polypeptide
DALRGSGAWGLLLRRVGDDVLVHLLARCALFVLVAPSCAY

SEQ ID NO: 4963 - protein, 40 aa, Artificial Sequence
  Description of Artificial Sequence: Synthetic polypeptide
SGAWGLLLRRVGDDVLVHLLARCALFVLVAPSCAYQVCGP

SEQ ID NO: 4964 - protein, 40 aa, Artificial Sequence
  Description of Artificial Sequence: Synthetic polypeptide
EILAKFLHWLMSVYVVELLRSFFYVTETTFQKNRLFFYRK

SEQ ID NO: 4965 - protein, 40 aa, Artificial Sequence
  Description of Artificial Sequence: Synthetic polypeptide
MAKFLHWLMSVYVVELLRSFFYVTETTFQKNRLFFYRKSV

SEQ ID NO: 4966 - protein, 40 aa, Artificial Sequence
  Description of Artificial Sequence: Synthetic polypeptide
FLHWLMSVYVVELLRSFFYVTETTFQKNRLFFYRKSVWSK

SEQ ID NO: 4967 - protein, 40 aa, Artificial Sequence
  Description of Artificial Sequence: Synthetic polypeptide
MHWLMSVYVVELLRSFFYVTETTFQKNRLFFYRKSVWSKL

SEQ ID NO: 4968 - protein, 40 aa, Artificial Sequence
  Description of Artificial Sequence: Synthetic polypeptide
HWLMSVYVVELLRSFFYVTETTFQKNRLFFYRKSVWSKLQ

SEQ ID NO: 4969 - protein, 40 aa, Artificial Sequence
  Description of Artificial Sequence: Synthetic polypeptide
VVELLRSFFYVTETTFQKNRLFFYRKSVWSKLQSIGIRQH

SEQ ID NO: 4970 - protein, 40 aa, Artificial Sequence
  Description of Artificial Sequence: Synthetic polypeptide
QKNRLFFYRKSVWSKLQSIGIRQHLKRVQLRELSEAEVRQ

SEQ ID NO: 4971 - protein, 40 aa, Artificial Sequence
  Description of Artificial Sequence: Synthetic polypeptide
RREKRAERLTSRVKALFSVLNYERARRPGLLGASVLGLDD

SEQ ID NO: 4972 - protein, 40 aa, Artificial Sequence
  Description of Artificial Sequence: Synthetic polypeptide
LNYERARRPGLLGASVLGLDDIHRAWRTFVLRVRAQDPPP

SEQ ID NO: 4973 - protein, 40 aa, Artificial Sequence
  Description of Artificial Sequence: Synthetic polypeptide
RARRPGLLGASVLGLDDIHRAWRTFVLRVRAQDPPPELYF

SEQ ID NO: 4974 - protein, 40 aa, Artificial Sequence
  Description of Artificial Sequence: Synthetic polypeptide
YGDMENKLFAGIRRDGLLLRLVDDFLLVTPHLTHAKTFLR

SEQ ID NO: 4975 - protein, 40 aa, Artificial Sequence
  Description of Artificial Sequence: Synthetic polypeptide
HSLFLDLQVNSLQTVCTNIYKILLLQAYRFHACVLQLPFH

SEQ ID NO: 4976 - protein, 40 aa, Artificial Sequence
  Description of Artificial Sequence: Synthetic polypeptide
VPLLGSLRTAQTQLSRKLPGTTLTALEAAANPALPSDFKT

SEQ ID NO: 4977 - protein, 40 aa, Artificial Sequence
  Description of Artificial Sequence: Synthetic polypeptide
TVCHDPKLPYHDFILEDAASPKCIMKEKKKPGETFFMCSC

SEQ ID NO: 4978 - protein, 40 aa, Artificial Sequence
  Description of Artificial Sequence: Synthetic polypeptide
HDPKLPYHDFILEDAASPKCIMKEKKKPGETFFMCSCSSD

SEQ ID NO: 4979 - protein, 40 aa, Artificial Sequence
  Description of Artificial Sequence: Synthetic polypeptide
LPYHDFILEDAASPKCIMKEKKKPGETFFMCSCSSDECND

SEQ ID NO: 4980 - protein, 40 aa, Artificial Sequence
  Description of Artificial Sequence: Synthetic polypeptide
PYHDFILEDAASPKCIMKEKKKPGETFFMCSCSSDECNDN

SEQ ID NO: 4981 - protein, 40 aa, Artificial Sequence
  Description of Artificial Sequence: Synthetic polypeptide
YHDFILEDAASPKCIMKEKKKPGETFFMCSCSSDECNDNI

SEQ ID NO: 4982 - protein, 40 aa, Artificial Sequence
  Description of Artificial Sequence: Synthetic polypeptide
HDFILEDAASPKCIMKEKKKPGETFFMCSCSSDECNDNII

SEQ ID NO: 4983 - protein, 40 aa, Artificial Sequence
  Description of Artificial Sequence: Synthetic polypeptide
DFILEDAASPKCIMKEKKKPGETFFMCSCSSDECNDNIIF

SEQ ID NO: 4984 - protein, 40 aa, Artificial Sequence
  Description of Artificial Sequence: Synthetic polypeptide
FILEDAASPKCIMKEKKKPGETFFMCSCSSDECNDNIIFS

SEQ ID NO: 4985 - protein, 40 aa, Artificial Sequence
  Description of Artificial Sequence: Synthetic polypeptide
ILEDAASPKCIMKEKKKPGETFFMCSCSSDECNDNIIFSE

SEQ ID NO: 4986 - protein, 40 aa, Artificial Sequence
  Description of Artificial Sequence: Synthetic polypeptide
MEDAASPKCIMKEKKKPGETFFMCSCSSDECNDNIIFSEE

SEQ ID NO: 4987 - protein, 40 aa, Artificial Sequence
  Description of Artificial Sequence: Synthetic polypeptide
EDAASPKCIMKEKKKPGETFFMCSCSSDECNDNIIFSEEY

SEQ ID NO: 4988 - protein, 40 aa, Artificial Sequence
  Description of Artificial Sequence: Synthetic polypeptide
CLCDFGLSLRLDPTLSVDDLANSGQVGTARYMAPEVLESR

SEQ ID NO: 4989 - protein, 40 aa, Artificial Sequence
  Description of Artificial Sequence: Synthetic polypeptide
SSCMGGMNRRPILTIITLEDSSGNLLGRNSFEVRVCACPG

SEQ ID NO: 4990 - protein, 40 aa, Artificial Sequence
  Description of Artificial Sequence: Synthetic polypeptide
CMGGMNRRPILTIITLEDSSGNLLGRNSFEVRVCACPGRD

SEQ ID NO: 4991 - protein, 40 aa, Artificial Sequence
  Description of Artificial Sequence: Synthetic polypeptide
VPSLNVDGQPIFANITLPVYTLKERCLQVVRSLVKPENYR

SEQ ID NO: 4992 - protein, 40 aa, Artificial Sequence
  Description of Artificial Sequence: Synthetic polypeptide
NVDGQPIFANITLPVYTLKERCLQVVRSLVKPENYRRLDI

SEQ ID NO: 4993 - protein, 40 aa, Artificial Sequence
  Description of Artificial Sequence: Synthetic polypeptide
MKERCLQVVRSLVKPENYRRLDIVRSLYEDLEDHPNVQKD

SEQ ID NO: 4994 - protein, 40 aa, Artificial Sequence
  Description of Artificial Sequence: Synthetic polypeptide
ERCLQVVRSLVKPENYRRLDIVRSLYEDLEDHPNVQKDLE

SEQ ID NO: 4995 - protein, 40 aa, Artificial Sequence
  Description of Artificial Sequence: Synthetic polypeptide
CLQVVRSLVKPENYRRLDIVRSLYEDLEDHPNVQKDLERL

SEQ ID NO: 4996 - protein, 40 aa, Artificial Sequence
  Description of Artificial Sequence: Synthetic polypeptide
KPENYRRLDIVRSLYEDLEDHPNVQKDLERLTQERIAHQR

SEQ ID NO: 4997 - protein, 40 aa, Artificial Sequence
  Description of Artificial Sequence: Synthetic polypeptide
PENYRRLDIVRSLYEDLEDHPNVQKDLERLTQERIAHQRM

SEQ ID NO: 4998 - protein, 40 aa, Artificial Sequence
  Description of Artificial Sequence: Synthetic polypeptide
PQPAPQGQGQPPSQPPQGQGPPSGPGQPAPAATQAAPQAP

SEQ ID NO: 4999 - protein, 40 aa, Artificial Sequence
  Description of Artificial Sequence: Synthetic polypeptide
NRFPDYLEAIPGTNVDLGTLEGDGMNIEGEELMPSLQEAL

SEQ ID NO: 5000 - protein, 40 aa, Artificial Sequence
  Description of Artificial Sequence: Synthetic polypeptide
RPQDVDQREAPLNNFSVAQCQLMKTERPRPNTFIIRCLQW

SEQ ID NO: 5001 - protein, 40 aa, Artificial Sequence
  Description of Artificial Sequence: Synthetic polypeptide
QWTTVIERTFHVETPEEREEWTTAIQTVADGLKKQEEEEM

SEQ ID NO: 5002 - protein, 40 aa, Artificial Sequence
  Description of Artificial Sequence: Synthetic polypeptide
GGELFFHLSRERVFSEDRARFYGAEIVSALDYLHSEKNVV

SEQ ID NO: 5003 - protein, 40 aa, Artificial Sequence
  Description of Artificial Sequence: Synthetic polypeptide
EMMCGRLPFYNQDHEKLFELILMEEIRFPRTLGPEAKSLL

SEQ ID NO: 5004 - protein, 40 aa, Artificial Sequence
  Description of Artificial Sequence: Synthetic polypeptide
CGRLPFYNQDHEKLFELILMEEIRFPRTLGPEAKSLLSGL

SEQ ID NO: 5005 - protein, 40 aa, Artificial Sequence
  Description of Artificial Sequence: Synthetic polypeptide
PEAKSLLSGLLKKDPKQRLGGGSEDAKEIMQHRFFAGIVW

SEQ ID NO: 5006 - protein, 40 aa, Artificial Sequence
  Description of Artificial Sequence: Synthetic polypeptide
MQHRFFAGIVWQHVYEKKLSPPFKPQVTSETDTRYFDEEF

SEQ ID NO: 5007 - protein, 40 aa, Artificial Sequence
  Description of Artificial Sequence: Synthetic polypeptide
RFFAGIVWQHVYEKKLSPPFKPQVTSETDTRYFDEEFTAQ

SEQ ID NO: 5008 - protein, 40 aa, Artificial Sequence
  Description of Artificial Sequence: Synthetic polypeptide
FAGIVWQHVYEKKLSPPFKPQVTSETDTRYFDEEFTAQMI

SEQ ID NO: 5009 - protein, 40 aa, Artificial Sequence
  Description of Artificial Sequence: Synthetic polypeptide
WQHVYEKKLSPPFKPQVTSETDTRYFDEEFTAQMITITPP

SEQ ID NO: 5010 - protein, 40 aa, Artificial Sequence
  Description of Artificial Sequence: Synthetic polypeptide
PQVTSETDTRYFDEEFTAQMITITPPDQDDSMECVDSERR

SEQ ID NO: 5011 - protein, 40 aa, Artificial Sequence
  Description of Artificial Sequence: Synthetic polypeptide
QQQQQQQQQQQQQQQQQQQQQETSPRQQQQQQGEDGSPQA

SEQ ID NO: 5012 - protein, 40 aa, Artificial Sequence
  Description of Artificial Sequence: Synthetic polypeptide
LGGTSTISDNAKELCKAVSVSMGLGVEALEHLSPGEQLRG

SEQ ID NO: 5013 - protein, 40 aa, Artificial Sequence
  Description of Artificial Sequence: Synthetic polypeptide
GGTSTISDNAKELCKAVSVSMGLGVEALEHLSPGEQLRGD

SEQ ID NO: 5014 - protein, 40 aa, Artificial Sequence
  Description of Artificial Sequence: Synthetic polypeptide
ISDNAKELCKAVSVSMGLGVEALEHLSPGEQLRGDCMYAP

SEQ ID NO: 5015 - protein, 40 aa, Artificial Sequence
  Description of Artificial Sequence: Synthetic polypeptide
PCAPLAECKGSLLDDSAGKSTEDTAEYSPFKGGYTKGLEG

SEQ ID NO: 5016 - protein, 40 aa, Artificial Sequence
  Description of Artificial Sequence: Synthetic polypeptide
ARIKLENPLDYGSAWAAAAAQCRYGDLASLHGAGAAGPGS

SEQ ID NO: 5017 - protein, 40 aa, Artificial Sequence
  Description of Artificial Sequence: Synthetic polypeptide
AWAAAAAQCRYGDLASLHGAGAAGPGSGSPSAAASSSWHT

SEQ ID NO: 5018 - protein, 40 aa, Artificial Sequence
  Description of Artificial Sequence: Synthetic polypeptide
APYGYTRPPQGLAGQESDFTAPDVWYPGGMVSRVPYPSPT

SEQ ID NO: 5019 - protein, 40 aa, Artificial Sequence
  Description of Artificial Sequence: Synthetic polypeptide
DYYFPPQKTCLICGDEASGCHYGALTCGSCKVFFKRAAEG

SEQ ID NO: 5020 - protein, 40 aa, Artificial Sequence
  Description of Artificial Sequence: Synthetic polypeptide
YYFPPQKTCLICGDEASGCHYGALTCGSCKVFFKRAAEGK

SEQ ID NO: 5021 - protein, 40 aa, Artificial Sequence
  Description of Artificial Sequence: Synthetic polypeptide
QKTCLICGDEASGCHYGALTCGSCKVFFKRAAEGKQKYLC

SEQ ID NO: 5022 - protein, 40 aa, Artificial Sequence
  Description of Artificial Sequence: Synthetic polypeptide
DEASGCHYGALTCGSCKVFFKRAAEGKQKYLCASRNDCTI

SEQ ID NO: 5023 - protein, 40 aa, Artificial Sequence
  Description of Artificial Sequence: Synthetic polypeptide
EASGCHYGALTCGSCKVFFKRAAEGKQKYLCASRNDCTID

SEQ ID NO: 5024 - protein, 40 aa, Artificial Sequence
  Description of Artificial Sequence: Synthetic polypeptide
CHYGALTCGSCKVFFKRAAEGKQKYLCASRNDCTIDKFRR

SEQ ID NO: 5025 - protein, 40 aa, Artificial Sequence
  Description of Artificial Sequence: Synthetic polypeptide
HYGALTCGSCKVFFKRAAEGKQKYLCASRNDCTIDKFRRK

SEQ ID NO: 5026 - protein, 40 aa, Artificial Sequence
  Description of Artificial Sequence: Synthetic polypeptide
YGALTCGSCKVFFKRAAEGKQKYLCASRNDCTIDKFRRKN

SEQ ID NO: 5027 - protein, 40 aa, Artificial Sequence
  Description of Artificial Sequence: Synthetic polypeptide
GALTCGSCKVFFKRAAEGKQKYLCASRNDCTIDKFRRKNC

SEQ ID NO: 5028 - protein, 40 aa, Artificial Sequence
  Description of Artificial Sequence: Synthetic polypeptide
SRNDCTIDKFRRKNCPSCRLRKCYEAGMTLGARKLKKLGN

SEQ ID NO: 5029 - protein, 40 aa, Artificial Sequence
  Description of Artificial Sequence: Synthetic polypeptide
RNDCTIDKFRRKNCPSCRLRKCYEAGMTLGARKLKKLGNL

SEQ ID NO: 5030 - protein, 40 aa, Artificial Sequence
  Description of Artificial Sequence: Synthetic polypeptide
NDCTIDKFRRKNCPSCRLRKCYEAGMTLGARKLKKLGNLK

SEQ ID NO: 5031 - protein, 40 aa, Artificial Sequence
  Description of Artificial Sequence: Synthetic polypeptide
DCTIDKFRRKNCPSCRLRKCYEAGMTLGARKLKKLGNLKL

SEQ ID NO: 5032 - protein, 40 aa, Artificial Sequence
  Description of Artificial Sequence: Synthetic polypeptide
TIDKFRRKNCPSCRLRKCYEAGMTLGARKLKKLGNLKLQE

SEQ ID NO: 5033 - protein, 40 aa, Artificial Sequence
  Description of Artificial Sequence: Synthetic polypeptide
IDKFRRKNCPSCRLRKCYEAGMTLGARKLKKLGNLKLQEE

SEQ ID NO: 5034 - protein, 40 aa, Artificial Sequence
  Description of Artificial Sequence: Synthetic polypeptide
DKFRRKNCPSCRLRKCYEAGMTLGARKLKKLGNLKLQEEG

SEQ ID NO: 5035 - protein, 40 aa, Artificial Sequence
  Description of Artificial Sequence: Synthetic polypeptide
KFRRKNCPSCRLRKCYEAGMTLGARKLKKLGNLKLQEEGE

SEQ ID NO: 5036 - protein, 40 aa, Artificial Sequence
  Description of Artificial Sequence: Synthetic polypeptide
FRRKNCPSCRLRKCYEAGMTLGARKLKKLGNLKLQEEGEA

SEQ ID NO: 5037 - protein, 40 aa, Artificial Sequence
  Description of Artificial Sequence: Synthetic polypeptide
RRKNCPSCRLRKCYEAGMTLGARKLKKLGNLKLQEEGEAS

SEQ ID NO: 5038 - protein, 40 aa, Artificial Sequence
  Description of Artificial Sequence: Synthetic polypeptide
RKNCPSCRLRKCYEAGMTLGARKLKKLGNLKLQEEGEASS

SEQ ID NO: 5039 - protein, 40 aa, Artificial Sequence
  Description of Artificial Sequence: Synthetic polypeptide
KNCPSCRLRKCYEAGMTLGARKLKKLGNLKLQEEGEASST

SEQ ID NO: 5040 - protein, 40 aa, Artificial Sequence
  Description of Artificial Sequence: Synthetic polypeptide
NCPSCRLRKCYEAGMTLGARKLKKLGNLKLQEEGEASSTT

SEQ ID NO: 5041 - protein, 40 aa, Artificial Sequence
  Description of Artificial Sequence: Synthetic polypeptide
CPSCRLRKCYEAGMTLGARKLKKLGNLKLQEEGEASSTTS

SEQ ID NO: 5042 - protein, 40 aa, Artificial Sequence
  Description of Artificial Sequence: Synthetic polypeptide
SCRLRKCYEAGMTLGARKLKKLGNLKLQEEGEASSTTSPT

SEQ ID NO: 5043 - protein, 40 aa, Artificial Sequence
  Description of Artificial Sequence: Synthetic polypeptide
RLRKCYEAGMTLGARKLKKLGNLKLQEEGEASSTTSPTEE

SEQ ID NO: 5044 - protein, 40 aa, Artificial Sequence
  Description of Artificial Sequence: Synthetic polypeptide
RKCYEAGMTLGARKLKKLGNLKLQEEGEASSTTSPTEETT

SEQ ID NO: 5045 - protein, 40 aa, Artificial Sequence
  Description of Artificial Sequence: Synthetic polypeptide
KCYEAGMTLGARKLKKLGNLKLQEEGEASSTTSPTEETTQ

SEQ ID NO: 5046 - protein, 40 aa, Artificial Sequence
  Description of Artificial Sequence: Synthetic polypeptide
CYEAGMTLGARKLKKLGNLKLQEEGEASSTTSPTEETTQK

SEQ ID NO: 5047 - protein, 40 aa, Artificial Sequence
  Description of Artificial Sequence: Synthetic polypeptide
YEAGMTLGARKLKKLGNLKLQEEGEASSTTSPTEETTQKL

SEQ ID NO: 5048 - protein, 40 aa, Artificial Sequence
  Description of Artificial Sequence: Synthetic polypeptide
EAGMTLGARKLKKLGNLKLQEEGEASSTTSPTEETTQKLT

SEQ ID NO: 5049 - protein, 40 aa, Artificial Sequence
  Description of Artificial Sequence: Synthetic polypeptide
GMTLGARKLKKLGNLKLQEEGEASSTTSPTEETTQKLTVS

SEQ ID NO: 5050 - protein, 40 aa, Artificial Sequence
  Description of Artificial Sequence: Synthetic polypeptide
MGARKLKKLGNLKLQEEGEASSTTSPTEETTQKLTVSHIE

SEQ ID NO: 5051 - protein, 40 aa, Artificial Sequence
  Description of Artificial Sequence: Synthetic polypeptide
GARKLKKLGNLKLQEEGEASSTTSPTEETTQKLTVSHIEG

SEQ ID NO: 5052 - protein, 40 aa, Artificial Sequence
  Description of Artificial Sequence: Synthetic polypeptide
KLKKLGNLKLQEEGEASSTTSPTEETTQKLTVSHIEGYEC

SEQ ID NO: 5053 - protein, 40 aa, Artificial Sequence
  Description of Artificial Sequence: Synthetic polypeptide
KKLGNLKLQEEGEASSTTSPTEETTQKLTVSHIEGYECQP

SEQ ID NO: 5054 - protein, 40 aa, Artificial Sequence
  Description of Artificial Sequence: Synthetic polypeptide
LFSIIPVDGLKNQKFFDELRMNYIKELDRIIACKRKNPTS

SEQ ID NO: 5055 - protein, 40 aa, Artificial Sequence
  Description of Artificial Sequence: Synthetic polypeptide
FSIIPVDGLKNQKFFDELRMNYIKELDRIIACKRKNPTSC

SEQ ID NO: 5056 - protein, 40 aa, Artificial Sequence
  Description of Artificial Sequence: Synthetic polypeptide
SIIPVDGLKNQKFFDELRMNYIKELDRIIACKRKNPTSCS

SEQ ID NO: 5057 - protein, 40 aa, Artificial Sequence
  Description of Artificial Sequence: Synthetic polypeptide
IIPVDGLKNQKFFDELRMNYIKELDRIIACKRKNPTSCSR

SEQ ID NO: 5058 - protein, 40 aa, Artificial Sequence
  Description of Artificial Sequence: Synthetic polypeptide
IPVDGLKNQKFFDELRMNYIKELDRIIACKRKNPTSCSRR

SEQ ID NO: 5059 - protein, 40 aa, Artificial Sequence
  Description of Artificial Sequence: Synthetic polypeptide
PVDGLKNQKFFDELRMNYIKELDRIIACKRKNPTSCSRRF

SEQ ID NO: 5060 - protein, 40 aa, Artificial Sequence
  Description of Artificial Sequence: Synthetic polypeptide
VDGLKNQKFFDELRMNYIKELDRIIACKRKNPTSCSRRFY

SEQ ID NO: 5061 - protein, 40 aa, Artificial Sequence
  Description of Artificial Sequence: Synthetic polypeptide
DGLKNQKFFDELRMNYIKELDRIIACKRKNPTSCSRRFYQ

SEQ ID NO: 5062 - protein, 40 aa, Artificial Sequence
  Description of Artificial Sequence: Synthetic polypeptide
GLKNQKFFDELRMNYIKELDRIIACKRKNPTSCSRRFYQL

SEQ ID NO: 5063 - protein, 40 aa, Artificial Sequence
  Description of Artificial Sequence: Synthetic polypeptide
QKFFDELRMNYIKELDRIIACKRKNPTSCSRRFYQLTKLL

SEQ ID NO: 5064 - protein, 40 aa, Artificial Sequence
  Description of Artificial Sequence: Synthetic polypeptide
KFFDELRMNYIKELDRIIACKRKNPTSCSRRFYQLTKLLD

SEQ ID NO: 5065 - protein, 40 aa, Artificial Sequence
  Description of Artificial Sequence: Synthetic polypeptide
FFDELRMNYIKELDRIIACKRKNPTSCSRRFYQLTKLLDS

SEQ ID NO: 5066 - protein, 40 aa, Artificial Sequence
  Description of Artificial Sequence: Synthetic polypeptide
FDELRMNYIKELDRIIACKRKNPTSCSRRFYQLTKLLDSV

SEQ ID NO: 5067 - protein, 40 aa, Artificial Sequence
  Description of Artificial Sequence: Synthetic polypeptide
DELRMNYIKELDRIIACKRKNPTSCSRRFYQLTKLLDSVQ

SEQ ID NO: 5068 - protein, 40 aa, Artificial Sequence
  Description of Artificial Sequence: Synthetic polypeptide
ELRMNYIKELDRIIACKRKNPTSCSRRFYQLTKLLDSVQP

SEQ ID NO: 5069 - protein, 40 aa, Artificial Sequence
  Description of Artificial Sequence: Synthetic polypeptide
RMNYIKELDRIIACKRKNPTSCSRRFYQLTKLLDSVQPIA

SEQ ID NO: 5070 - protein, 40 aa, Artificial Sequence
  Description of Artificial Sequence: Synthetic polypeptide
DRIIACKRKNPTSCSRRFYQLTKLLDSVQPIARELHQFTF

SEQ ID NO: 5071 - protein, 40 aa, Artificial Sequence
  Description of Artificial Sequence: Synthetic polypeptide
IIACKRKNPTSCSRRFYQLTKLLDSVQPIARELHQFTFDL

SEQ ID NO: 5072 - protein, 40 aa, Artificial Sequence
  Description of Artificial Sequence: Synthetic polypeptide
KRKNPTSCSRRFYQLTKLLDSVQPIARELHQFTFDLLIKS

SEQ ID NO: 5073 - protein, 40 aa, Artificial Sequence
  Description of Artificial Sequence: Synthetic polypeptide
TSCSRRFYQLTKLLDSVQPIARELHQFTFDLLIKSHMVSV

SEQ ID NO: 5074 - protein, 40 aa, Artificial Sequence
  Description of Artificial Sequence: Synthetic polypeptide
PANGAEPSRAVGTVKVYLPNKQRTVVTVRDGMSVYDSLDK

SEQ ID NO: 5075 - protein, 40 aa, Artificial Sequence
  Description of Artificial Sequence: Synthetic polypeptide
MAFCDFCLKFLFHGFRCQTCGYKFHQHCSSKVPTVCVDMS

SEQ ID NO: 5076 - protein, 40 aa, Artificial Sequence
  Description of Artificial Sequence: Synthetic polypeptide
AFCDFCLKFLFHGFRCQTCGYKFHQHCSSKVPTVCVDMST

SEQ ID NO: 5077 - protein, 40 aa, Artificial Sequence
  Description of Artificial Sequence: Synthetic polypeptide
RKSPHSKSPAEQRERKSLADDKKKVKNLGYRDSGYYWEVP

SEQ ID NO: 5078 - protein, 40 aa, Artificial Sequence
  Description of Artificial Sequence: Synthetic polypeptide
SPHSKSPAEQRERKSLADDKKKVKNLGYRDSGYYWEVPPS

SEQ ID NO: 5079 - protein, 40 aa, Artificial Sequence
  Description of Artificial Sequence: Synthetic polypeptide
GSFGTVFRGRWHGDVAVKVLKVSQPTAEQAQAFKNEMQVL

SEQ ID NO: 5080 - protein, 40 aa, Artificial Sequence
  Description of Artificial Sequence: Synthetic polypeptide
SFGTVFRGRWHGDVAVKVLKVSQPTAEQAQAFKNEMQVLR

SEQ ID NO: 5081 - protein, 40 aa, Artificial Sequence
  Description of Artificial Sequence: Synthetic polypeptide
FGTVFRGRWHGDVAVKVLKVSQPTAEQAQAFKNEMQVLRK

SEQ ID NO: 5082 - protein, 40 aa, Artificial Sequence
  Description of Artificial Sequence: Synthetic polypeptide
YAYGVVLYELMTGSLPYSHIGCRDQIIFMVGRGYLSPDLS

SEQ ID NO: 5083 - protein, 40 aa, Artificial Sequence
  Description of Artificial Sequence: Synthetic polypeptide
MTGSLPYSHIGCRDQIIFMVGRGYLSPDLSKISSNCPKAM

SEQ ID NO: 5084 - protein, 40 aa, Artificial Sequence
  Description of Artificial Sequence: Synthetic polypeptide
PYSHIGCRDQIIFMVGRGYLSPDLSKISSNCPKAMRRLLS

SEQ ID NO: 5085 - protein, 40 aa, Artificial Sequence
  Description of Artificial Sequence: Synthetic polypeptide
AGAAASSAADPAIPEEVWNIKQMIKLTQEHIEALLDKFGG

SEQ ID NO: 5086 - protein, 40 aa, Artificial Sequence
  Description of Artificial Sequence: Synthetic polypeptide
GAAASSAADPAIPEEVWNIKQMIKLTQEHIEALLDKFGGE

SEQ ID NO: 5087 - protein, 40 aa, Artificial Sequence
  Description of Artificial Sequence: Synthetic polypeptide
AAASSAADPAIPEEVWNIKQMIKLTQEHIEALLDKFGGEH

SEQ ID NO: 5088 - protein, 40 aa, Artificial Sequence
  Description of Artificial Sequence: Synthetic polypeptide
AASSAADPAIPEEVWNIKQMIKLTQEHIEALLDKFGGEHN

SEQ ID NO: 5089 - protein, 40 aa, Artificial Sequence
  Description of Artificial Sequence: Synthetic polypeptide
ASSAADPAIPEEVWNIKQMIKLTQEHIEALLDKFGGEHNP

SEQ ID NO: 5090 - protein, 40 aa, Artificial Sequence
  Description of Artificial Sequence: Synthetic polypeptide
DPAIPEEVWNIKQMIKLTQEHIEALLDKFGGEHNPPSIYL

SEQ ID NO: 5091 - protein, 40 aa, Artificial Sequence
  Description of Artificial Sequence: Synthetic polypeptide
WNIKQMIKLTQEHIEALLDKFGGEHNPPSIYLEAYEEYTS

SEQ ID NO: 5092 - protein, 40 aa, Artificial Sequence
  Description of Artificial Sequence: Synthetic polypeptide
KQMIKLTQEHIEALLDKFGGEHNPPSIYLEAYEEYTSKLD

SEQ ID NO: 5093 - protein, 40 aa, Artificial Sequence
  Description of Artificial Sequence: Synthetic polypeptide
MDKFGGEHNPPSIYLEAYEEYTSKLDALQQREQQLLESLG

SEQ ID NO: 5094 - protein, 40 aa, Artificial Sequence
  Description of Artificial Sequence: Synthetic polypeptide
EQQLLESLGNGTDFSVSSSASMDTVTSSSSSSLSVLPSSL

SEQ ID NO: 5095 - protein, 40 aa, Artificial Sequence
  Description of Artificial Sequence: Synthetic polypeptide
QQLLESLGNGTDFSVSSSASMDTVTSSSSSSLSVLPSSLS

SEQ ID NO: 5096 - protein, 40 aa, Artificial Sequence
  Description of Artificial Sequence: Synthetic polypeptide
QLLESLGNGTDFSVSSSASMDTVTSSSSSSLSVLPSSLSV

SEQ ID NO: 5097 - protein, 40 aa, Artificial Sequence
  Description of Artificial Sequence: Synthetic polypeptide
LLESLGNGTDFSVSSSASMDTVTSSSSSSLSVLPSSLSVF

SEQ ID NO: 5098 - protein, 40 aa, Artificial Sequence
  Description of Artificial Sequence: Synthetic polypeptide
MESLGNGTDFSVSSSASMDTVTSSSSSSLSVLPSSLSVFQ

SEQ ID NO: 5099 - protein, 40 aa, Artificial Sequence
  Description of Artificial Sequence: Synthetic polypeptide
MGNGTDFSVSSSASMDTVTSSSSSSLSVLPSSLSVFQNPT

SEQ ID NO: 5100 - protein, 40 aa, Artificial Sequence
  Description of Artificial Sequence: Synthetic polypeptide
NGTDFSVSSSASMDTVTSSSSSSLSVLPSSLSVFQNPTDV

SEQ ID NO: 5101 - protein, 40 aa, Artificial Sequence
  Description of Artificial Sequence: Synthetic polypeptide
GTDFSVSSSASMDTVTSSSSSSLSVLPSSLSVFQNPTDVA

SEQ ID NO: 5102 - protein, 40 aa, Artificial Sequence
  Description of Artificial Sequence: Synthetic polypeptide
TDFSVSSSASMDTVTSSSSSSLSVLPSSLSVFQNPTDVAR

SEQ ID NO: 5103 - protein, 40 aa, Artificial Sequence
  Description of Artificial Sequence: Synthetic polypeptide
FSVSSSASMDTVTSSSSSSLSVLPSSLSVFQNPTDVARSN

SEQ ID NO: 5104 - protein, 40 aa, Artificial Sequence
  Description of Artificial Sequence: Synthetic polypeptide
SVSSSASMDTVTSSSSSSLSVLPSSLSVFQNPTDVARSNP

SEQ ID NO: 5105 - protein, 40 aa, Artificial Sequence
  Description of Artificial Sequence: Synthetic polypeptide
ASMDTVTSSSSSSLSVLPSSLSVFQNPTDVARSNPKSPQK

SEQ ID NO: 5106 - protein, 40 aa, Artificial Sequence
  Description of Artificial Sequence: Synthetic polypeptide
DTVTSSSSSSLSVLPSSLSVFQNPTDVARSNPKSPQKPIV

SEQ ID NO: 5107 - protein, 40 aa, Artificial Sequence
  Description of Artificial Sequence: Synthetic polypeptide
TVTSSSSSSLSVLPSSLSVFQNPTDVARSNPKSPQKPIVR

SEQ ID NO: 5108 - protein, 40 aa, Artificial Sequence
  Description of Artificial Sequence: Synthetic polypeptide
SSSSSSLSVLPSSLSVFQNPTDVARSNPKSPQKPIVRVFL

SEQ ID NO: 5109 - protein, 40 aa, Artificial Sequence
  Description of Artificial Sequence: Synthetic polypeptide
VARSNPKSPQKPIVRVFLPNKQRTVVPARCGVTVRDSLKK

SEQ ID NO: 5110 - protein, 40 aa, Artificial Sequence
  Description of Artificial Sequence: Synthetic polypeptide
LTGEELHVEVLENVPLTTHNFVRKTFFTLAFCDFCRKLLF

SEQ ID NO: 5111 - protein, 40 aa, Artificial Sequence
  Description of Artificial Sequence: Synthetic polypeptide
MHVEVLENVPLTTHNFVRKTFFTLAFCDFCRKLLFQGFRC

SEQ ID NO: 5112 - protein, 40 aa, Artificial Sequence
  Description of Artificial Sequence: Synthetic polypeptide
HVEVLENVPLTTHNFVRKTFFTLAFCDFCRKLLFQGFRCQ

SEQ ID NO: 5113 - protein, 40 aa, Artificial Sequence
  Description of Artificial Sequence: Synthetic polypeptide
ENVPLTTHNFVRKTFFTLAFCDFCRKLLFQGFRCQTCGYK

SEQ ID NO: 5114 - protein, 40 aa, Artificial Sequence
  Description of Artificial Sequence: Synthetic polypeptide
VPLTTHNFVRKTFFTLAFCDFCRKLLFQGFRCQTCGYKFH

SEQ ID NO: 5115 - protein, 40 aa, Artificial Sequence
  Description of Artificial Sequence: Synthetic polypeptide
LTTHNFVRKTFFTLAFCDFCRKLLFQGFRCQTCGYKFHQR

SEQ ID NO: 5116 - protein, 40 aa, Artificial Sequence
  Description of Artificial Sequence: Synthetic polypeptide
TTHNFVRKTFFTLAFCDFCRKLLFQGFRCQTCGYKFHQRC

SEQ ID NO: 5117 - protein, 40 aa, Artificial Sequence
  Description of Artificial Sequence: Synthetic polypeptide
KTFFTLAFCDFCRKLLFQGFRCQTCGYKFHQRCSTEVPLM

SEQ ID NO: 5118 - protein, 40 aa, Artificial Sequence
  Description of Artificial Sequence: Synthetic polypeptide
TFFTLAFCDFCRKLLFQGFRCQTCGYKFHQRCSTEVPLMC

SEQ ID NO: 5119 - protein, 40 aa, Artificial Sequence
  Description of Artificial Sequence: Synthetic polypeptide
FFTLAFCDFCRKLLFQGFRCQTCGYKFHQRCSTEVPLMCV

SEQ ID NO: 5120 - protein, 40 aa, Artificial Sequence
  Description of Artificial Sequence: Synthetic polypeptide
FTLAFCDFCRKLLFQGFRCQTCGYKFHQRCSTEVPLMCVN

SEQ ID NO: 5121 - protein, 40 aa, Artificial Sequence
  Description of Artificial Sequence: Synthetic polypeptide
AFCDFCRKLLFQGFRCQTCGYKFHQRCSTEVPLMCVNYDQ

SEQ ID NO: 5122 - protein, 40 aa, Artificial Sequence
  Description of Artificial Sequence: Synthetic polypeptide
CDFCRKLLFQGFRCQTCGYKFHQRCSTEVPLMCVNYDQLD

SEQ ID NO: 5123 - protein, 40 aa, Artificial Sequence
  Description of Artificial Sequence: Synthetic polypeptide
DFCRKLLFQGFRCQTCGYKFHQRCSTEVPLMCVNYDQLDL

SEQ ID NO: 5124 - protein, 40 aa, Artificial Sequence
  Description of Artificial Sequence: Synthetic polypeptide
FCRKLLFQGFRCQTCGYKFHQRCSTEVPLMCVNYDQLDLL

SEQ ID NO: 5125 - protein, 40 aa, Artificial Sequence
  Description of Artificial Sequence: Synthetic polypeptide
CRKLLFQGFRCQTCGYKFHQRCSTEVPLMCVNYDQLDLLF

SEQ ID NO: 5126 - protein, 40 aa, Artificial Sequence
  Description of Artificial Sequence: Synthetic polypeptide
RKLLFQGFRCQTCGYKFHQRCSTEVPLMCVNYDQLDLLFV

SEQ ID NO: 5127 - protein, 40 aa, Artificial Sequence
  Description of Artificial Sequence: Synthetic polypeptide
KLLFQGFRCQTCGYKFHQRCSTEVPLMCVNYDQLDLLFVS

SEQ ID NO: 5128 - protein, 40 aa, Artificial Sequence
  Description of Artificial Sequence: Synthetic polypeptide
MLFQGFRCQTCGYKFHQRCSTEVPLMCVNYDQLDLLFVSK

SEQ ID NO: 5129 - protein, 40 aa, Artificial Sequence
  Description of Artificial Sequence: Synthetic polypeptide
LFQGFRCQTCGYKFHQRCSTEVPLMCVNYDQLDLLFVSKF

SEQ ID NO: 5130 - protein, 40 aa, Artificial Sequence
  Description of Artificial Sequence: Synthetic polypeptide
FQGFRCQTCGYKFHQRCSTEVPLMCVNYDQLDLLFVSKFF

SEQ ID NO: 5131 - protein, 40 aa, Artificial Sequence
  Description of Artificial Sequence: Synthetic polypeptide
QGFRCQTCGYKFHQRCSTEVPLMCVNYDQLDLLFVSKFFE

SEQ ID NO: 5132 - protein, 40 aa, Artificial Sequence
  Description of Artificial Sequence: Synthetic polypeptide
CQTCGYKFHQRCSTEVPLMCVNYDQLDLLFVSKFFEHHPI

SEQ ID NO: 5133 - protein, 40 aa, Artificial Sequence
  Description of Artificial Sequence: Synthetic polypeptide
TCGYKFHQRCSTEVPLMCVNYDQLDLLFVSKFFEHHPIPQ

SEQ ID NO: 5134 - protein, 40 aa, Artificial Sequence
  Description of Artificial Sequence: Synthetic polypeptide
RDRSSSAPNVHINTIEPVNIDDLIRDQGFRGDGGSTTGLS

SEQ ID NO: 5135 - protein, 40 aa, Artificial Sequence
  Description of Artificial Sequence: Synthetic polypeptide
DRSSSAPNVHINTIEPVNIDDLIRDQGFRGDGGSTTGLSA

SEQ ID NO: 5136 - protein, 40 aa, Artificial Sequence
  Description of Artificial Sequence: Synthetic polypeptide
SSAPNVHINTIEPVNIDDLIRDQGFRGDGGSTTGLSATPP

SEQ ID NO: 5137 - protein, 40 aa, Artificial Sequence
  Description of Artificial Sequence: Synthetic polypeptide
SAPNVHINTIEPVNIDDLIRDQGFRGDGGSTTGLSATPPA

SEQ ID NO: 5138 - protein, 40 aa, Artificial Sequence
  Description of Artificial Sequence: Synthetic polypeptide
APNVHINTIEPVNIDDLIRDQGFRGDGGSTTGLSATPPAS

SEQ ID NO: 5139 - protein, 40 aa, Artificial Sequence
  Description of Artificial Sequence: Synthetic polypeptide
PNVHINTIEPVNIDDLIRDQGFRGDGGSTTGLSATPPASL

SEQ ID NO: 5140 - protein, 40 aa, Artificial Sequence
  Description of Artificial Sequence: Synthetic polypeptide
NVHINTIEPVNIDDLIRDQGFRGDGGSTTGLSATPPASLP

SEQ ID NO: 5141 - protein, 40 aa, Artificial Sequence
  Description of Artificial Sequence: Synthetic polypeptide
VHINTIEPVNIDDLIRDQGFRGDGGSTTGLSATPPASLPG

SEQ ID NO: 5142 - protein, 40 aa, Artificial Sequence
  Description of Artificial Sequence: Synthetic polypeptide
HINTIEPVNIDDLIRDQGFRGDGGSTTGLSATPPASLPGS

SEQ ID NO: 5143 - protein, 40 aa, Artificial Sequence
  Description of Artificial Sequence: Synthetic polypeptide
INTIEPVNIDDLIRDQGFRGDGGSTTGLSATPPASLPGSL

SEQ ID NO: 5144 - protein, 40 aa, Artificial Sequence
  Description of Artificial Sequence: Synthetic polypeptide
EPVNIDDLIRDQGFRGDGGSTTGLSATPPASLPGSLTNVK

SEQ ID NO: 5145 - protein, 40 aa, Artificial Sequence
  Description of Artificial Sequence: Synthetic polypeptide
NIDDLIRDQGFRGDGGSTTGLSATPPASLPGSLTNVKALQ

SEQ ID NO: 5146 - protein, 40 aa, Artificial Sequence
  Description of Artificial Sequence: Synthetic polypeptide
DQGFRGDGGSTTGLSATPPASLPGSLTNVKALQKSPGPQR

SEQ ID NO: 5147 - protein, 40 aa, Artificial Sequence
  Description of Artificial Sequence: Synthetic polypeptide
QGFRGDGGSTTGLSATPPASLPGSLTNVKALQKSPGPQRE

SEQ ID NO: 5148 - protein, 40 aa, Artificial Sequence
  Description of Artificial Sequence: Synthetic polypeptide
FRGDGGSTTGLSATPPASLPGSLTNVKALQKSPGPQRERK

SEQ ID NO: 5149 - protein, 40 aa, Artificial Sequence
  Description of Artificial Sequence: Synthetic polypeptide
GDGGSTTGLSATPPASLPGSLTNVKALQKSPGPQRERKSS

SEQ ID NO: 5150 - protein, 40 aa, Artificial Sequence
  Description of Artificial Sequence: Synthetic polypeptide
GGSTTGLSATPPASLPGSLTNVKALQKSPGPQRERKSSSS

SEQ ID NO: 5151 - protein, 40 aa, Artificial Sequence
  Description of Artificial Sequence: Synthetic polypeptide
GSTTGLSATPPASLPGSLTNVKALQKSPGPQRERKSSSSS

SEQ ID NO: 5152 - protein, 40 aa, Artificial Sequence
  Description of Artificial Sequence: Synthetic polypeptide
TTGLSATPPASLPGSLTNVKALQKSPGPQRERKSSSSSED

SEQ ID NO: 5153 - protein, 40 aa, Artificial Sequence
  Description of Artificial Sequence: Synthetic polypeptide
MGYSTKPQLAIVTQWCEGSSLYHHLHIIETKFEMIKLIDI

SEQ ID NO: 5154 - protein, 40 aa, Artificial Sequence
  Description of Artificial Sequence: Synthetic polypeptide
YSTKPQLAIVTQWCEGSSLYHHLHIIETKFEMIKLIDIAR

SEQ ID NO: 5155 - protein, 40 aa, Artificial Sequence
  Description of Artificial Sequence: Synthetic polypeptide
HIIETKFEMIKLIDIARQTAQGMDYLHAKSIIHRDLKSNN

SEQ ID NO: 5156 - protein, 40 aa, Artificial Sequence
  Description of Artificial Sequence: Synthetic polypeptide
IIETKFEMIKLIDIARQTAQGMDYLHAKSIIHRDLKSNNI

SEQ ID NO: 5157 - protein, 40 aa, Artificial Sequence
  Description of Artificial Sequence: Synthetic polypeptide
LIDIARQTAQGMDYLHAKSIIHRDLKSNNIFLHEDLTVKI

SEQ ID NO: 5158 - protein, 40 aa, Artificial Sequence
  Description of Artificial Sequence: Synthetic polypeptide
IARQTAQGMDYLHAKSIIHRDLKSNNIFLHEDLTVKIGDF

SEQ ID NO: 5159 - protein, 40 aa, Artificial Sequence
  Description of Artificial Sequence: Synthetic polypeptide
AQGMDYLHAKSIIHRDLKSNNIFLHEDLTVKIGDFGLATV

SEQ ID NO: 5160 - protein, 40 aa, Artificial Sequence
  Description of Artificial Sequence: Synthetic polypeptide
QGMDYLHAKSIIHRDLKSNNIFLHEDLTVKIGDFGLATVK

SEQ ID NO: 5161 - protein, 40 aa, Artificial Sequence
  Description of Artificial Sequence: Synthetic polypeptide
MDYLHAKSIIHRDLKSNNIFLHEDLTVKIGDFGLATVKSR

SEQ ID NO: 5162 - protein, 40 aa, Artificial Sequence
  Description of Artificial Sequence: Synthetic polypeptide
IHRDLKSNNIFLHEDLTVKIGDFGLATVKSRWSGSHQFEQ

SEQ ID NO: 5163 - protein, 40 aa, Artificial Sequence
  Description of Artificial Sequence: Synthetic polypeptide
HRDLKSNNIFLHEDLTVKIGDFGLATVKSRWSGSHQFEQL

SEQ ID NO: 5164 - protein, 40 aa, Artificial Sequence
  Description of Artificial Sequence: Synthetic polypeptide
RDLKSNNIFLHEDLTVKIGDFGLATVKSRWSGSHQFEQLS

SEQ ID NO: 5165 - protein, 40 aa, Artificial Sequence
  Description of Artificial Sequence: Synthetic polypeptide
SNNIFLHEDLTVKIGDFGLATVKSRWSGSHQFEQLSGSIL

SEQ ID NO: 5166 - protein, 40 aa, Artificial Sequence
  Description of Artificial Sequence: Synthetic polypeptide
NNIFLHEDLTVKIGDFGLATVKSRWSGSHQFEQLSGSILW

SEQ ID NO: 5167 - protein, 40 aa, Artificial Sequence
  Description of Artificial Sequence: Synthetic polypeptide
IGDFGLATVKSRWSGSHQFEQLSGSILWMAPEVIRMQDKN

SEQ ID NO: 5168 - protein, 40 aa, Artificial Sequence
  Description of Artificial Sequence: Synthetic polypeptide
DKNPYSFQSDVYAFGIVLYELMTGQLPYSNINNRDQIIFM

SEQ ID NO: 5169 - protein, 40 aa, Artificial Sequence
  Description of Artificial Sequence: Synthetic polypeptide
SFQSDVYAFGIVLYELMTGQLPYSNINNRDQIIFMVGRGY

SEQ ID NO: 5170 - protein, 40 aa, Artificial Sequence
  Description of Artificial Sequence: Synthetic polypeptide
QSDVYAFGIVLYELMTGQLPYSNINNRDQIIFMVGRGYLS

SEQ ID NO: 5171 - protein, 40 aa, Artificial Sequence
  Description of Artificial Sequence: Synthetic polypeptide
VYAFGIVLYELMTGQLPYSNINNRDQIIFMVGRGYLSPDL

SEQ ID NO: 5172 - protein, 40 aa, Artificial Sequence
  Description of Artificial Sequence: Synthetic polypeptide
AFGIVLYELMTGQLPYSNINNRDQIIFMVGRGYLSPDLSK

SEQ ID NO: 5173 - protein, 40 aa, Artificial Sequence
  Description of Artificial Sequence: Synthetic polypeptide
GIVLYELMTGQLPYSNINNRDQIIFMVGRGYLSPDLSKVR

SEQ ID NO: 5174 - protein, 40 aa, Artificial Sequence
  Description of Artificial Sequence: Synthetic polypeptide
IVLYELMTGQLPYSNINNRDQIIFMVGRGYLSPDLSKVRS

SEQ ID NO: 5175 - protein, 40 aa, Artificial Sequence
  Description of Artificial Sequence: Synthetic polypeptide
VLYELMTGQLPYSNINNRDQIIFMVGRGYLSPDLSKVRSN

SEQ ID NO: 5176 - protein, 40 aa, Artificial Sequence
  Description of Artificial Sequence: Synthetic polypeptide
MYELMTGQLPYSNINNRDQIIFMVGRGYLSPDLSKVRSNC

SEQ ID NO: 5177 - protein, 40 aa, Artificial Sequence
  Description of Artificial Sequence: Synthetic polypeptide
YELMTGQLPYSNINNRDQIIFMVGRGYLSPDLSKVRSNCP

SEQ ID NO: 5178 - protein, 40 aa, Artificial Sequence
  Description of Artificial Sequence: Synthetic polypeptide
MMTGQLPYSNINNRDQIIFMVGRGYLSPDLSKVRSNCPKA

SEQ ID NO: 5179 - protein, 40 aa, Artificial Sequence
  Description of Artificial Sequence: Synthetic polypeptide
QLPYSNINNRDQIIFMVGRGYLSPDLSKVRSNCPKAMKRL

SEQ ID NO: 5180 - protein, 40 aa, Artificial Sequence
  Description of Artificial Sequence: Synthetic polypeptide
LPYSNINNRDQIIFMVGRGYLSPDLSKVRSNCPKAMKRLM

SEQ ID NO: 5181 - protein, 40 aa, Artificial Sequence
  Description of Artificial Sequence: Synthetic polypeptide
INNRDQIIFMVGRGYLSPDLSKVRSNCPKAMKRLMAECLK

SEQ ID NO: 5182 - protein, 40 aa, Artificial Sequence
  Description of Artificial Sequence: Synthetic polypeptide
IFMVGRGYLSPDLSKVRSNCPKAMKRLMAECLKKKRDERP

SEQ ID NO: 5183 - protein, 40 aa, Artificial Sequence
  Description of Artificial Sequence: Synthetic polypeptide
RGYLSPDLSKVRSNCPKAMKRLMAECLKKKRDERPLFPQI

SEQ ID NO: 5184 - protein, 40 aa, Artificial Sequence
  Description of Artificial Sequence: Synthetic polypeptide
SPDLSKVRSNCPKAMKRLMAECLKKKRDERPLFPQILASI

SEQ ID NO: 5185 - protein, 40 aa, Artificial Sequence
  Description of Artificial Sequence: Synthetic polypeptide
DLSKVRSNCPKAMKRLMAECLKKKRDERPLFPQILASIEL

SEQ ID NO: 5186 - protein, 40 aa, Artificial Sequence
  Description of Artificial Sequence: Synthetic polypeptide
ESNLSFLKELLFRINRLDLLITYLNTRKEEMERELQTPGR

SEQ ID NO: 5187 - protein, 40 aa, Artificial Sequence
  Description of Artificial Sequence: Synthetic polypeptide
DLLITYLNTRKEEMERELQTPGRAQISAYRVMLYQISEEV

SEQ ID NO: 5188 - protein, 40 aa, Artificial Sequence
  Description of Artificial Sequence: Synthetic polypeptide
MLITYLNTRKEEMERELQTPGRAQISAYRVMLYQISEEVS

SEQ ID NO: 5189 - protein, 40 aa, Artificial Sequence
  Description of Artificial Sequence: Synthetic polypeptide
MITYLNTRKEEMERELQTPGRAQISAYRVMLYQISEEVSR

SEQ ID NO: 5190 - protein, 40 aa, Artificial Sequence
  Description of Artificial Sequence: Synthetic polypeptide
TYLNTRKEEMERELQTPGRAQISAYRVMLYQISEEVSRSE

SEQ ID NO: 5191 - protein, 40 aa, Artificial Sequence
  Description of Artificial Sequence: Synthetic polypeptide
EEMERELQTPGRAQISAYRVMLYQISEEVSRSELRSFKFL

SEQ ID NO: 5192 - protein, 40 aa, Artificial Sequence
  Description of Artificial Sequence: Synthetic polypeptide
EMERELQTPGRAQISAYRVMLYQISEEVSRSELRSFKFLL

SEQ ID NO: 5193 - protein, 40 aa, Artificial Sequence
  Description of Artificial Sequence: Synthetic polypeptide
LQTPGRAQISAYRVMLYQISEEVSRSELRSFKFLLQEEIS

SEQ ID NO: 5194 - protein, 40 aa, Artificial Sequence
  Description of Artificial Sequence: Synthetic polypeptide
QTPGRAQISAYRVMLYQISEEVSRSELRSFKFLLQEEISK

SEQ ID NO: 5195 - protein, 40 aa, Artificial Sequence
  Description of Artificial Sequence: Synthetic polypeptide
AQISAYRVMLYQISEEVSRSELRSFKFLLQEEISKCKLDD

SEQ ID NO: 5196 - protein, 40 aa, Artificial Sequence
  Description of Artificial Sequence: Synthetic polypeptide
KLDDDMNLLDIFIEMEKRVILGEGKLDILKRVCAQINKSL

SEQ ID NO: 5197 - protein, 40 aa, Artificial Sequence
  Description of Artificial Sequence: Synthetic polypeptide
DDMNLLDIFIEMEKRVILGEGKLDILKRVCAQINKSLLKI

SEQ ID NO: 5198 - protein, 40 aa, Artificial Sequence
  Description of Artificial Sequence: Synthetic polypeptide
DIFIEMEKRVILGEGKLDILKRVCAQINKSLLKIINDYEE

SEQ ID NO: 5199 - protein, 40 aa, Artificial Sequence
  Description of Artificial Sequence: Synthetic polypeptide
IFIEMEKRVILGEGKLDILKRVCAQINKSLLKIINDYEEF

SEQ ID NO: 5200 - protein, 40 aa, Artificial Sequence
  Description of Artificial Sequence: Synthetic polypeptide
FIEMEKRVILGEGKLDILKRVCAQINKSLLKIINDYEEFS

SEQ ID NO: 5201 - protein, 40 aa, Artificial Sequence
  Description of Artificial Sequence: Synthetic polypeptide
EMEKRVILGEGKLDILKRVCAQINKSLLKIINDYEEFSKE

SEQ ID NO: 5202 - protein, 40 aa, Artificial Sequence
  Description of Artificial Sequence: Synthetic polypeptide
MEKRVILGEGKLDILKRVCAQINKSLLKIINDYEEFSKER

SEQ ID NO: 5203 - protein, 40 aa, Artificial Sequence
  Description of Artificial Sequence: Synthetic polypeptide
EKRVILGEGKLDILKRVCAQINKSLLKIINDYEEFSKERS

SEQ ID NO: 5204 - protein, 40 aa, Artificial Sequence
  Description of Artificial Sequence: Synthetic polypeptide
KRVILGEGKLDILKRVCAQINKSLLKIINDYEEFSKERSS

SEQ ID NO: 5205 - protein, 40 aa, Artificial Sequence
  Description of Artificial Sequence: Synthetic polypeptide
VILGEGKLDILKRVCAQINKSLLKIINDYEEFSKERSSSL

SEQ ID NO: 5206 - protein, 40 aa, Artificial Sequence
  Description of Artificial Sequence: Synthetic polypeptide
ILGEGKLDILKRVCAQINKSLLKIINDYEEFSKERSSSLE

SEQ ID NO: 5207 - protein, 40 aa, Artificial Sequence
  Description of Artificial Sequence: Synthetic polypeptide
GEGKLDILKRVCAQINKSLLKIINDYEEFSKERSSSLEGS

SEQ ID NO: 5208 - protein, 40 aa, Artificial Sequence
  Description of Artificial Sequence: Synthetic polypeptide
GKLDILKRVCAQINKSLLKIINDYEEFSKERSSSLEGSPD

SEQ ID NO: 5209 - protein, 40 aa, Artificial Sequence
  Description of Artificial Sequence: Synthetic polypeptide
KLDILKRVCAQINKSLLKIINDYEEFSKERSSSLEGSPDE

SEQ ID NO: 5210 - protein, 40 aa, Artificial Sequence
  Description of Artificial Sequence: Synthetic polypeptide
DILKRVCAQINKSLLKIINDYEEFSKERSSSLEGSPDEFS

SEQ ID NO: 5211 - protein, 40 aa, Artificial Sequence
  Description of Artificial Sequence: Synthetic polypeptide
ILKRVCAQINKSLLKIINDYEEFSKERSSSLEGSPDEFSN

SEQ ID NO: 5212 - protein, 40 aa, Artificial Sequence
  Description of Artificial Sequence: Synthetic polypeptide
QINKSLLKIINDYEEFSKERSSSLEGSPDEFSNGEELCGV

SEQ ID NO: 5213 - protein, 40 aa, Artificial Sequence
  Description of Artificial Sequence: Synthetic polypeptide
SIRDRNGTHLDAGALTTTFEELHFEIKPHDDCTVEQIYEI

SEQ ID NO: 5214 - protein, 40 aa, Artificial Sequence
  Description of Artificial Sequence: Synthetic polypeptide
NGTHLDAGALTTTFEELHFEIKPHDDCTVEQIYEILKIYQ

SEQ ID NO: 5215 - protein, 40 aa, Artificial Sequence
  Description of Artificial Sequence: Synthetic polypeptide
GTHLDAGALTTTFEELHFEIKPHDDCTVEQIYEILKIYQL

SEQ ID NO: 5216 - protein, 40 aa, Artificial Sequence
  Description of Artificial Sequence: Synthetic polypeptide
SHGDKGIIYGTDGQEAPIYELTSQFTGLKCPSLAGKPKVF

SEQ ID NO: 5217 - protein, 40 aa, Artificial Sequence
  Description of Artificial Sequence: Synthetic polypeptide
GDKGIIYGTDGQEAPIYELTSQFTGLKCPSLAGKPKVFFI

SEQ ID NO: 5218 - protein, 40 aa, Artificial Sequence
  Description of Artificial Sequence: Synthetic polypeptide
GIIYGTDGQEAPIYELTSQFTGLKCPSLAGKPKVFFIQAC

SEQ ID NO: 5219 - protein, 40 aa, Artificial Sequence
  Description of Artificial Sequence: Synthetic polypeptide
YGTDGQEAPIYELTSQFTGLKCPSLAGKPKVFFIQACQGD

SEQ ID NO: 5220 - protein, 40 aa, Artificial Sequence
  Description of Artificial Sequence: Synthetic polypeptide
GTDGQEAPIYELTSQFTGLKCPSLAGKPKVFFIQACQGDN

SEQ ID NO: 5221 - protein, 40 aa, Artificial Sequence; identical to SEQ ID NO: 2975
  Description of Artificial Sequence: Synthetic polypeptide

SEQ ID NO: 5222 - protein, 40 aa, Artificial Sequence
  Description of Artificial Sequence: Synthetic polypeptide
QEAPIYELTSQFTGLKCPSLAGKPKVFFIQACQGDNYQKG

SEQ ID NO: 5223 - protein, 40 aa, Artificial Sequence
  Description of Artificial Sequence: Synthetic polypeptide
ATVNNCVSYRNPAEGTWYIQSLCQSLRERCPRGDDILTIL

SEQ ID NO: 5224 - protein, 40 aa, Artificial Sequence
  Description of Artificial Sequence: Synthetic polypeptide
NPAEGTWYIQSLCQSLRERCPRGDDILTILTEVNYEVSNK

SEQ ID NO: 5225 - protein, 40 aa, Artificial Sequence
  Description of Artificial Sequence: Synthetic polypeptide
QSLRERCPRGDDILTILTEVNYEVSNKDDKKNMGKQMPQP

SEQ ID NO: 5226 - protein, 40 aa, Artificial Sequence
  Description of Artificial Sequence: Synthetic polypeptide
DILTILTEVNYEVSNKDDKKNMGKQMPQPTFTLRKKLVFP

SEQ ID NO: 5227 - protein, 40 aa, Artificial Sequence
  Description of Artificial Sequence: Synthetic polypeptide
ILTILTEVNYEVSNKDDKKNMGKQMPQPTFTLRKKLVFPS

SEQ ID NO: 5228 - protein, 40 aa, Artificial Sequence
  Description of Artificial Sequence: Synthetic polypeptide
LTILTEVNYEVSNKDDKKNMGKQMPQPTFTLRKKLVFPSD

SEQ ID NO: 5229 - protein, 40 aa, Artificial Sequence
  Description of Artificial Sequence: Synthetic polypeptide
RAYPDANLLNDRVLRAMLKAEETCAPSVSYFKCVQKEVLP

SEQ ID NO: 5230 - protein, 40 aa, Artificial Sequence
  Description of Artificial Sequence: Synthetic polypeptide
NDRVLRAMLKAEETCAPSVSYFKCVQKEVLPSMRKIVATW

SEQ ID NO: 5231 - protein, 40 aa, Artificial Sequence
  Description of Artificial Sequence: Synthetic polypeptide
MLEVCEEQKCEEEVFPLAMNYLDRFLSLEPVKKSRLQLLG

SEQ ID NO: 5232 - protein, 40 aa, Artificial Sequence
  Description of Artificial Sequence: Synthetic polypeptide
MEVCEEQKCEEEVFPLAMNYLDRFLSLEPVKKSRLQLLGA

SEQ ID NO: 5233 - protein, 40 aa, Artificial Sequence
  Description of Artificial Sequence: Synthetic polypeptide
EEQKCEEEVFPLAMNYLDRFLSLEPVKKSRLQLLGATCMF

SEQ ID NO: 5234 - protein, 40 aa, Artificial Sequence
  Description of Artificial Sequence: Synthetic polypeptide
QKCEEEVFPLAMNYLDRFLSLEPVKKSRLQLLGATCMFVA

SEQ ID NO: 5235 - protein, 40 aa, Artificial Sequence
  Description of Artificial Sequence: Synthetic polypeptide
FPLAMNYLDRFLSLEPVKKSRLQLLGATCMFVASKMKETI

SEQ ID NO: 5236 - protein, 40 aa, Artificial Sequence
  Description of Artificial Sequence: Synthetic polypeptide
PLAMNYLDRFLSLEPVKKSRLQLLGATCMFVASKMKETIP

SEQ ID NO: 5237 - protein, 40 aa, Artificial Sequence
  Description of Artificial Sequence: Synthetic polypeptide
MAMNYLDRFLSLEPVKKSRLQLLGATCMFVASKMKETIPL

SEQ ID NO: 5238 - protein, 40 aa, Artificial Sequence
  Description of Artificial Sequence: Synthetic polypeptide
MNYLDRFLSLEPVKKSRLQLLGATCMFVASKMKETIPLTA

SEQ ID NO: 5239 - protein, 40 aa, Artificial Sequence
  Description of Artificial Sequence: Synthetic polypeptide
NYLDRFLSLEPVKKSRLQLLGATCMFVASKMKETIPLTAE

SEQ ID NO: 5240 - protein, 40 aa, Artificial Sequence
  Description of Artificial Sequence: Synthetic polypeptide
YLDRFLSLEPVKKSRLQLLGATCMFVASKMKETIPLTAEK

SEQ ID NO: 5241 - protein, 40 aa, Artificial Sequence
  Description of Artificial Sequence: Synthetic polypeptide
MDRFLSLEPVKKSRLQLLGATCMFVASKMKETIPLTAEKL

SEQ ID NO: 5242 - protein, 40 aa, Artificial Sequence
  Description of Artificial Sequence: Synthetic polypeptide
DRFLSLEPVKKSRLQLLGATCMFVASKMKETIPLTAEKLC

SEQ ID NO: 5243 - protein, 40 aa, Artificial Sequence
  Description of Artificial Sequence: Synthetic polypeptide
MEPVKKSRLQLLGATCMFVASKMKETIPLTAEKLCIYTDN

SEQ ID NO: 5244 - protein, 40 aa, Artificial Sequence
  Description of Artificial Sequence: Synthetic polypeptide
EPVKKSRLQLLGATCMFVASKMKETIPLTAEKLCIYTDNS

SEQ ID NO: 5245 - protein, 40 aa, Artificial Sequence
  Description of Artificial Sequence: Synthetic polypeptide
PVKKSRLQLLGATCMFVASKMKETIPLTAEKLCIYTDNSI

SEQ ID NO: 5246 - protein, 40 aa, Artificial Sequence
  Description of Artificial Sequence: Synthetic polypeptide
VKKSRLQLLGATCMFVASKMKETIPLTAEKLCIYTDNSIR

SEQ ID NO: 5247 - protein, 40 aa, Artificial Sequence
  Description of Artificial Sequence: Synthetic polypeptide
KKSRLQLLGATCMFVASKMKETIPLTAEKLCIYTDNSIRP

SEQ ID NO: 5248 - protein, 40 aa, Artificial Sequence
  Description of Artificial Sequence: Synthetic polypeptide
VALCATDVKFISNPPSMVAAGSVVAAVQGLNLRSPNNFLS

SEQ ID NO: 5249 - protein, 40 aa, Artificial Sequence
  Description of Artificial Sequence: Synthetic polypeptide
SNPPSMVAAGSVVAAVQGLNLRSPNNFLSYYRLTRFLSRV

SEQ ID NO: 5250 - protein, 40 aa, Artificial Sequence
  Description of Artificial Sequence: Synthetic polypeptide
LRACQEQIEALLESSLRQAQQNMDPKAAEEEEEEEEEVDL

SEQ ID NO: 5251 - protein, 40 aa, Artificial Sequence
  Description of Artificial Sequence: Synthetic polypeptide
GPWSRSLSALLLLLQVSSWLCQEPEPCHPGFDAESYTFTV

SEQ ID NO: 5252 - protein, 40 aa, Artificial Sequence
  Description of Artificial Sequence: Synthetic polypeptide
SLSALLLLLQVSSWLCQEPEPCHPGFDAESYTFTVPRRHL

SEQ ID NO: 5253 - protein, 40 aa, Artificial Sequence
  Description of Artificial Sequence: Synthetic polypeptide
EPCHPGFDAESYTFTVPRRHLERGRVLGRVNFEDCTGRQR

SEQ ID NO: 5254 - protein, 40 aa, Artificial Sequence
  Description of Artificial Sequence: Synthetic polypeptide
RGRVLGRVNFEDCTGRQRTAYFSLDTRFKVGTDGVITVKR

SEQ ID NO: 5255 - protein, 40 aa, Artificial Sequence
  Description of Artificial Sequence: Synthetic polypeptide
YFSLDTRFKVGTDGVITVKRPLRFHNPQIHFLVYAWDSTY

SEQ ID NO: 5256 - protein, 40 aa, Artificial Sequence
  Description of Artificial Sequence: Synthetic polypeptide
HQASVSGIQAELLTFPNSSPGLRRQKRDWVIPPISCPENE

SEQ ID NO: 5257 - protein, 40 aa, Artificial Sequence
  Description of Artificial Sequence: Synthetic polypeptide
ELLTFPNSSPGLRRQKRDWVIPPISCPENEKGPFPKNLVQ

SEQ ID NO: 5258 - protein, 40 aa, Artificial Sequence
  Description of Artificial Sequence: Synthetic polypeptide
LTFPNSSPGLRRQKRDWVIPPISCPENEKGPFPKNLVQIK

SEQ ID NO: 5259 - protein, 40 aa, Artificial Sequence
  Description of Artificial Sequence: Synthetic polypeptide
TFPNSSPGLRRQKRDWVIPPISCPENEKGPFPKNLVQIKS

SEQ ID NO: 5260 - protein, 40 aa, Artificial Sequence
  Description of Artificial Sequence: Synthetic polypeptide
FPNSSPGLRRQKRDWVIPPISCPENEKGPFPKNLVQIKSN

SEQ ID NO: 5261 - protein, 40 aa, Artificial Sequence
  Description of Artificial Sequence: Synthetic polypeptide
SSPGLRRQKRDWVIPPISCPENEKGPFPKNLVQIKSNKDK

SEQ ID NO: 5262 - protein, 40 aa, Artificial Sequence
  Description of Artificial Sequence: Synthetic polypeptide
GLRRQKRDWVIPPISCPENEKGPFPKNLVQIKSNKDKEGK

SEQ ID NO: 5263 - protein, 40 aa, Artificial Sequence
  Description of Artificial Sequence: Synthetic polypeptide
LRRQKRDWVIPPISCPENEKGPFPKNLVQIKSNKDKEGKV

SEQ ID NO: 5264 - protein, 40 aa, Artificial Sequence
  Description of Artificial Sequence: Synthetic polypeptide
KRDWVIPPISCPENEKGPFPKNLVQIKSNKDKEGKVFYSI

SEQ ID NO: 5265 - protein, 40 aa, Artificial Sequence
  Description of Artificial Sequence: Synthetic polypeptide
RDWVIPPISCPENEKGPFPKNLVQIKSNKDKEGKVFYSIT

SEQ ID NO: 5266 - protein, 40 aa, Artificial Sequence
  Description of Artificial Sequence: Synthetic polypeptide
DWVIPPISCPENEKGPFPKNLVQIKSNKDKEGKVFYSITG

SEQ ID NO: 5267 - protein, 40 aa, Artificial Sequence
  Description of Artificial Sequence: Synthetic polypeptide
WVIPPISCPENEKGPFPKNLVQIKSNKDKEGKVFYSITGQ

SEQ ID NO: 5268 - protein, 40 aa, Artificial Sequence
  Description of Artificial Sequence: Synthetic polypeptide
IPPISCPENEKGPFPKNLVQIKSNKDKEGKVFYSITGQGA

SEQ ID NO: 5269 - protein, 40 aa, Artificial Sequence
  Description of Artificial Sequence: Synthetic polypeptide
PPISCPENEKGPFPKNLVQIKSNKDKEGKVFYSITGQGAD

SEQ ID NO: 5270 - protein, 40 aa, Artificial Sequence
  Description of Artificial Sequence: Synthetic polypeptide
ISCPENEKGPFPKNLVQIKSNKDKEGKVFYSITGQGADTP

SEQ ID NO: 5271 - protein, 40 aa, Artificial Sequence
  Description of Artificial Sequence: Synthetic polypeptide
SCPENEKGPFPKNLVQIKSNKDKEGKVFYSITGQGADTPP

SEQ ID NO: 5272 - protein, 40 aa, Artificial Sequence
  Description of Artificial Sequence: Synthetic polypeptide
CPENEKGPFPKNLVQIKSNKDKEGKVFYSITGQGADTPPV

SEQ ID NO: 5273 - protein, 40 aa, Artificial Sequence
  Description of Artificial Sequence: Synthetic polypeptide
PENEKGPFPKNLVQIKSNKDKEGKVFYSITGQGADTPPVG

SEQ ID NO: 5274 - protein, 40 aa, Artificial Sequence
  Description of Artificial Sequence: Synthetic polypeptide
ENEKGPFPKNLVQIKSNKDKEGKVFYSITGQGADTPPVGV

SEQ ID NO: 5275 - protein, 40 aa, Artificial Sequence
  Description of Artificial Sequence: Synthetic polypeptide
EKGPFPKNLVQIKSNKDKEGKVFYSITGQGADTPPVGVFI

SEQ ID NO: 5276 - protein, 40 aa, Artificial Sequence
  Description of Artificial Sequence: Synthetic polypeptide
KGPFPKNLVQIKSNKDKEGKVFYSITGQGADTPPVGVFII

SEQ ID NO: 5277 - protein, 40 aa, Artificial Sequence
  Description of Artificial Sequence: Synthetic polypeptide
GPFPKNLVQIKSNKDKEGKVFYSITGQGADTPPVGVFIIE

SEQ ID NO: 5278 - protein, 40 aa, Artificial Sequence
  Description of Artificial Sequence: Synthetic polypeptide
ITGQGADTPPVGVFIIERETGWLKVTEPLDRERIATYTLF

SEQ ID NO: 5279 - protein, 40 aa, Artificial Sequence
  Description of Artificial Sequence: Synthetic polypeptide
GQGADTPPVGVFIIERETGWLKVTEPLDRERIATYTLFSH

SEQ ID NO: 5280 - protein, 40 aa, Artificial Sequence
  Description of Artificial Sequence: Synthetic polypeptide
MEILITVTDQNDNKPEFTQEVFKGSVMEGALPGTSVMEVT

SEQ ID NO: 5281 - protein, 40 aa, Artificial Sequence
  Description of Artificial Sequence: Synthetic polypeptide
TINRNTGVISVVTTGLDRESFPTYTLVVQAADLQGEGLST

SEQ ID NO: 5282 - protein, 40 aa, Artificial Sequence
  Description of Artificial Sequence: Synthetic polypeptide
RNTGVISVVTTGLDRESFPTYTLVVQAADLQGEGLSTTAT

SEQ ID NO: 5283 - protein, 40 aa, Artificial Sequence
  Description of Artificial Sequence: Synthetic polypeptide
VTTGLDRESFPTYTLVVQAADLQGEGLSTTATAVITVTDT

SEQ ID NO: 5284 - protein, 40 aa, Artificial Sequence
  Description of Artificial Sequence: Synthetic polypeptide
TTGLDRESFPTYTLVVQAADLQGEGLSTTATAVITVTDTN

SEQ ID NO: 5285 - protein, 40 aa, Artificial Sequence
  Description of Artificial Sequence: Synthetic polypeptide
MDRESFPTYTLVVQAADLQGEGLSTTATAVITVTDTNDNP

SEQ ID NO: 5286 - protein, 40 aa, Artificial Sequence
  Description of Artificial Sequence: Synthetic polypeptide
EANVVITTLKVTDADAPNTPAWEAVYTILNDDGGQFVVTT

SEQ ID NO: 5287 - protein, 40 aa, Artificial Sequence
  Description of Artificial Sequence: Synthetic polypeptide
AVYTILNDDGGQFVVTTNPVNNDGILKTAKGLDFEAKQQY

SEQ ID NO: 5288 - protein, 40 aa, Artificial Sequence
  Description of Artificial Sequence: Synthetic polypeptide
VYTILNDDGGQFVVTTNPVNNDGILKTAKGLDFEAKQQYI

SEQ ID NO: 5289 - protein, 40 aa, Artificial Sequence
  Description of Artificial Sequence: Synthetic polypeptide
YTILNDDGGQFVVTTNPVNNDGILKTAKGLDFEAKQQYIL

SEQ ID NO: 5290 - protein, 40 aa, Artificial Sequence
  Description of Artificial Sequence: Synthetic polypeptide
PFTAELTHGASANWTIQYNDPTQESIILKPKMALEVGDYK

SEQ ID NO: 5291 - protein, 40 aa, Artificial Sequence
  Description of Artificial Sequence: Synthetic polypeptide
LTHGASANWTIQYNDPTQESIILKPKMALEVGDYKINLKL

SEQ ID NO: 5292 - protein, 40 aa, Artificial Sequence
  Description of Artificial Sequence: Synthetic polypeptide
GASANWTIQYNDPTQESIILKPKMALEVGDYKINLKLMDN

SEQ ID NO: 5293 - protein, 40 aa, Artificial Sequence
  Description of Artificial Sequence: Synthetic polypeptide
SANWTIQYNDPTQESIILKPKMALEVGDYKINLKLMDNQN

SEQ ID NO: 5294 - protein, 40 aa, Artificial Sequence
  Description of Artificial Sequence: Synthetic polypeptide
WTIQYNDPTQESIILKPKMALEVGDYKINLKLMDNQNKDQ

SEQ ID NO: 5295 - protein, 40 aa, Artificial Sequence
  Description of Artificial Sequence: Synthetic polypeptide
TIQYNDPTQESIILKPKMALEVGDYKINLKLMDNQNKDQV

SEQ ID NO: 5296 - protein, 40 aa, Artificial Sequence
  Description of Artificial Sequence: Synthetic polypeptide
QYNDPTQESIILKPKMALEVGDYKINLKLMDNQNKDQVTT

SEQ ID NO: 5297 - protein, 40 aa, Artificial Sequence
  Description of Artificial Sequence: Synthetic polypeptide
NDPTQESIILKPKMALEVGDYKINLKLMDNQNKDQVTTLE

SEQ ID NO: 5298 - protein, 40 aa, Artificial Sequence
  Description of Artificial Sequence: Synthetic polypeptide
DPTQESIILKPKMALEVGDYKINLKLMDNQNKDQVTTLEV

SEQ ID NO: 5299 - protein, 40 aa, Artificial Sequence
  Description of Artificial Sequence: Synthetic polypeptide
TQESIILKPKMALEVGDYKINLKLMDNQNKDQVTTLEVSV

SEQ ID NO: 5300 - protein, 40 aa, Artificial Sequence
  Description of Artificial Sequence: Synthetic polypeptide
SIILKPKMALEVGDYKINLKLMDNQNKDQVTTLEVSVCDC

SEQ ID NO: 5301 - protein, 40 aa, Artificial Sequence
  Description of Artificial Sequence: Synthetic polypeptide
MALEVGDYKINLKLMDNQNKDQVTTLEVSVCDCEGAAGVC

SEQ ID NO: 5302 - protein, 40 aa, Artificial Sequence
  Description of Artificial Sequence: Synthetic polypeptide
ALEVGDYKINLKLMDNQNKDQVTTLEVSVCDCEGAAGVCR

SEQ ID NO: 5303 - protein, 40 aa, Artificial Sequence
  Description of Artificial Sequence: Synthetic polypeptide
NQNKDQVTTLEVSVCDCEGAAGVCRKAQPVEAGLQIPAIL

SEQ ID NO: 5304 - protein, 40 aa, Artificial Sequence
  Description of Artificial Sequence: Synthetic polypeptide
AAGVCRKAQPVEAGLQIPAILGILGGILALLILILLLLLF

SEQ ID NO: 5305 - protein, 40 aa, Artificial Sequence
  Description of Artificial Sequence: Synthetic polypeptide
QIPAILGILGGILALLILILLLLLFLRRRAVVKEPLLPPE

SEQ ID NO: 5306 - protein, 40 aa, Artificial Sequence
  Description of Artificial Sequence: Synthetic polypeptide
MHRGLDARPEVTRNDVAPTLMSVPRYLPRPANPDEIGNFI

SEQ ID NO: 5307 - protein, 40 aa, Artificial Sequence
  Description of Artificial Sequence: Synthetic polypeptide
NPDEIGNFIDENLKAADTDPTAPPYDSLLVFDYEGSGSEA

SEQ ID NO: 5308 - protein, 40 aa, Artificial Sequence
  Description of Artificial Sequence: Synthetic polypeptide
DEIGNFIDENLKAADTDPTAPPYDSLLVFDYEGSGSEAAS

SEQ ID NO: 5309 - protein, 40 aa, Artificial Sequence
  Description of Artificial Sequence: Synthetic polypeptide
EIGNFIDENLKAADTDPTAPPYDSLLVFDYEGSGSEAASL

SEQ ID NO: 5310 - protein, 40 aa, Artificial Sequence
  Description of Artificial Sequence: Synthetic polypeptide
IGNFIDENLKAADTDPTAPPYDSLLVFDYEGSGSEAASLS

SEQ ID NO: 5311 - protein, 40 aa, Artificial Sequence
  Description of Artificial Sequence: Synthetic polypeptide
SHSSSGTLSSLETVSTQELYSIPEDQEPEDQEPEEPTPAP

SEQ ID NO: 5312 - protein, 40 aa, Artificial Sequence
  Description of Artificial Sequence: Synthetic polypeptide
HSSSGTLSSLETVSTQELYSIPEDQEPEDQEPEEPTPAPW

SEQ ID NO: 5313 - protein, 40 aa, Artificial Sequence
  Description of Artificial Sequence: Synthetic polypeptide
SSSGTLSSLETVSTQELYSIPEDQEPEDQEPEEPTPAPWA

SEQ ID NO: 5314 - protein, 40 aa, Artificial Sequence
  Description of Artificial Sequence: Synthetic polypeptide
SSGTLSSLETVSTQELYSIPEDQEPEDQEPEEPTPAPWAR

SEQ ID NO: 5315 - protein, 40 aa, Artificial Sequence
  Description of Artificial Sequence: Synthetic polypeptide
SGTLSSLETVSTQELYSIPEDQEPEDQEPEEPTPAPWARL

SEQ ID NO: 5316 - protein, 40 aa, Artificial Sequence
  Description of Artificial Sequence: Synthetic polypeptide
TLSSLETVSTQELYSIPEDQEPEDQEPEEPTPAPWARLWA

SEQ ID NO: 5317 - protein, 40 aa, Artificial Sequence
  Description of Artificial Sequence: Synthetic polypeptide
MSSLETVSTQELYSIPEDQEPEDQEPEEPTPAPWARLWAL

SEQ ID NO: 5318 - protein, 40 aa, Artificial Sequence
  Description of Artificial Sequence: Synthetic polypeptide
SLETVSTQELYSIPEDQEPEDQEPEEPTPAPWARLWALQD

SEQ ID NO: 5319 - protein, 40 aa, Artificial Sequence
  Description of Artificial Sequence: Synthetic polypeptide
LETVSTQELYSIPEDQEPEDQEPEEPTPAPWARLWALQDG

SEQ ID NO: 5320 - protein, 40 aa, Artificial Sequence
  Description of Artificial Sequence: Synthetic polypeptide
TVSTQELYSIPEDQEPEDQEPEEPTPAPWARLWALQDGFA

SEQ ID NO: 5321 - protein, 40 aa, Artificial Sequence
  Description of Artificial Sequence: Synthetic polypeptide
VSTQELYSIPEDQEPEDQEPEEPTPAPWARLWALQDGFAN

SEQ ID NO: 5322 - protein, 40 aa, Artificial Sequence
  Description of Artificial Sequence: Synthetic polypeptide
STQELYSIPEDQEPEDQEPEEPTPAPWARLWALQDGFANL

SEQ ID NO: 5323 - protein, 40 aa, Artificial Sequence
  Description of Artificial Sequence: Synthetic polypeptide
TQELYSIPEDQEPEDQEPEEPTPAPWARLWALQDGFANLE

SEQ ID NO: 5324 - protein, 40 aa, Artificial Sequence
  Description of Artificial Sequence: Synthetic polypeptide
QELYSIPEDQEPEDQEPEEPTPAPWARLWALQDGFANLEC

SEQ ID NO: 5325 - protein, 40 aa, Artificial Sequence
  Description of Artificial Sequence: Synthetic polypeptide
LYSIPEDQEPEDQEPEEPTPAPWARLWALQDGFANLECVN

SEQ ID NO: 5326 - protein, 40 aa, Artificial Sequence
  Description of Artificial Sequence: Synthetic polypeptide
QEPEDQEPEEPTPAPWARLWALQDGFANLECVNDNYWFGR

SEQ ID NO: 5327 - protein, 40 aa, Artificial Sequence
  Description of Artificial Sequence: Synthetic polypeptide
DQEPEEPTPAPWARLWALQDGFANLECVNDNYWFGRDKSC

SEQ ID NO: 5328 - protein, 40 aa, Artificial Sequence
  Description of Artificial Sequence: Synthetic polypeptide
TPAPWARLWALQDGFANLECVNDNYWFGRDKSCEYCFDEP

SEQ ID NO: 5329 - protein, 40 aa, Artificial Sequence
  Description of Artificial Sequence: Synthetic polypeptide
APWARLWALQDGFANLECVNDNYWFGRDKSCEYCFDEPLL

SEQ ID NO: 5330 - protein, 40 aa, Artificial Sequence
  Description of Artificial Sequence: Synthetic polypeptide
PWARLWALQDGFANLECVNDNYWFGRDKSCEYCFDEPLLK

SEQ ID NO: 5331 - protein, 40 aa, Artificial Sequence
  Description of Artificial Sequence: Synthetic polypeptide
WARLWALQDGFANLECVNDNYWFGRDKSCEYCFDEPLLKR

SEQ ID NO: 5332 - protein, 40 aa, Artificial Sequence
  Description of Artificial Sequence: Synthetic polypeptide
QDGFANLECVNDNYWFGRDKSCEYCFDEPLLKRTDKYRTY

SEQ ID NO: 5333 - protein, 40 aa, Artificial Sequence
  Description of Artificial Sequence: Synthetic polypeptide
GFANLECVNDNYWFGRDKSCEYCFDEPLLKRTDKYRTYSK

SEQ ID NO: 5334 - protein, 40 aa, Artificial Sequence
  Description of Artificial Sequence: Synthetic polypeptide
NLECVNDNYWFGRDKSCEYCFDEPLLKRTDKYRTYSKKHF

SEQ ID NO: 5335 - protein, 40 aa, Artificial Sequence
  Description of Artificial Sequence: Synthetic polypeptide
VNDNYWFGRDKSCEYCFDEPLLKRTDKYRTYSKKHFRIFR

SEQ ID NO: 5336 - protein, 40 aa, Artificial Sequence
  Description of Artificial Sequence: Synthetic polypeptide
CEYCFDEPLLKRTDKYRTYSKKHFRIFREVGPKNSYIAYI

SEQ ID NO: 5337 - protein, 40 aa, Artificial Sequence
  Description of Artificial Sequence: Synthetic polypeptide
EYCFDEPLLKRTDKYRTYSKKHFRIFREVGPKNSYIAYIE

SEQ ID NO: 5338 - protein, 40 aa, Artificial Sequence
  Description of Artificial Sequence: Synthetic polypeptide
YCFDEPLLKRTDKYRTYSKKHFRIFREVGPKNSYIAYIED

SEQ ID NO: 5339 - protein, 40 aa, Artificial Sequence
  Description of Artificial Sequence: Synthetic polypeptide
CFDEPLLKRTDKYRTYSKKHFRIFREVGPKNSYIAYIEDH

SEQ ID NO: 5340 - protein, 40 aa, Artificial Sequence
  Description of Artificial Sequence: Synthetic polypeptide
PLLKRTDKYRTYSKKHFRIFREVGPKNSYIAYIEDHSGNG

SEQ ID NO: 5341 - protein, 40 aa, Artificial Sequence
  Description of Artificial Sequence: Synthetic polypeptide
MLKRTDKYRTYSKKHFRIFREVGPKNSYIAYIEDHSGNGT

SEQ ID NO: 5342 - protein, 40 aa, Artificial Sequence
  Description of Artificial Sequence: Synthetic polypeptide
SKKHFRIFREVGPKNSYIAYIEDHSGNGTFVNTELVGKGK

SEQ ID NO: 5343 - protein, 40 aa, Artificial Sequence
  Description of Artificial Sequence: Synthetic polypeptide
KHFRIFREVGPKNSYIAYIEDHSGNGTFVNTELVGKGKRR

SEQ ID NO: 5344 - protein, 40 aa, Artificial Sequence
  Description of Artificial Sequence: Synthetic polypeptide
HFRIFREVGPKNSYIAYIEDHSGNGTFVNTELVGKGKRRP

SEQ ID NO: 5345 - protein, 40 aa, Artificial Sequence
  Description of Artificial Sequence: Synthetic polypeptide
RIFREVGPKNSYIAYIEDHSGNGTFVNTELVGKGKRRPLN

SEQ ID NO: 5346 - protein, 40 aa, Artificial Sequence
  Description of Artificial Sequence: Synthetic polypeptide
IFREVGPKNSYIAYIEDHSGNGTFVNTELVGKGKRRPLNN

SEQ ID NO: 5347 - protein, 40 aa, Artificial Sequence
  Description of Artificial Sequence: Synthetic polypeptide
FREVGPKNSYIAYIEDHSGNGTFVNTELVGKGKRRPLNNN

SEQ ID NO: 5348 - protein, 40 aa, Artificial Sequence
  Description of Artificial Sequence: Synthetic polypeptide
EVGPKNSYIAYIEDHSGNGTFVNTELVGKGKRRPLNNNSE

SEQ ID NO: 5349 - protein, 40 aa, Artificial Sequence
  Description of Artificial Sequence: Synthetic polypeptide
VGPKNSYIAYIEDHSGNGTFVNTELVGKGKRRPLNNNSEI

SEQ ID NO: 5350 - protein, 40 aa, Artificial Sequence
  Description of Artificial Sequence: Synthetic polypeptide
KNSYIAYIEDHSGNGTFVNTELVGKGKRRPLNNNSEIALS

SEQ ID NO: 5351 - protein, 40 aa, Artificial Sequence
  Description of Artificial Sequence: Synthetic polypeptide
NSYIAYIEDHSGNGTFVNTELVGKGKRRPLNNNSEIALSL

SEQ ID NO: 5352 - protein, 40 aa, Artificial Sequence
  Description of Artificial Sequence: Synthetic polypeptide
SYIAYIEDHSGNGTFVNTELVGKGKRRPLNNNSEIALSLS

SEQ ID NO: 5353 - protein, 40 aa, Artificial Sequence
  Description of Artificial Sequence: Synthetic polypeptide
IAYIEDHSGNGTFVNTELVGKGKRRPLNNNSEIALSLSRN

SEQ ID NO: 5354 - protein, 40 aa, Artificial Sequence
  Description of Artificial Sequence: Synthetic polypeptide
YIEDHSGNGTFVNTELVGKGKRRPLNNNSEIALSLSRNKV

SEQ ID NO: 5355 - protein, 40 aa, Artificial Sequence
  Description of Artificial Sequence: Synthetic polypeptide
IEDHSGNGTFVNTELVGKGKRRPLNNNSEIALSLSRNKVF

SEQ ID NO: 5356 - protein, 40 aa, Artificial Sequence
  Description of Artificial Sequence: Synthetic polypeptide
NTELVGKGKRRPLNNNSEIALSLSRNKVFVFFDLTVDDQS

SEQ ID NO: 5357 - protein, 40 aa, Artificial Sequence
  Description of Artificial Sequence: Synthetic polypeptide
TELVGKGKRRPLNNNSEIALSLSRNKVFVFFDLTVDDQSV

SEQ ID NO: 5358 - protein, 40 aa, Artificial Sequence
  Description of Artificial Sequence: Synthetic polypeptide
ELVGKGKRRPLNNNSEIALSLSRNKVFVFFDLTVDDQSVY

SEQ ID NO: 5359 - protein, 40 aa, Artificial Sequence
  Description of Artificial Sequence: Synthetic polypeptide
LVGKGKRRPLNNNSEIALSLSRNKVFVFFDLTVDDQSVYP

SEQ ID NO: 5360 - protein, 40 aa, Artificial Sequence
  Description of Artificial Sequence: Synthetic polypeptide
VGKGKRRPLNNNSEIALSLSRNKVFVFFDLTVDDQSVYPK

SEQ ID NO: 5361 - protein, 40 aa, Artificial Sequence
  Description of Artificial Sequence: Synthetic polypeptide
GKRRPLNNNSEIALSLSRNKVFVFFDLTVDDQSVYPKALR

SEQ ID NO: 5362 - protein, 40 aa, Artificial Sequence
  Description of Artificial Sequence: Synthetic polypeptide
KRRPLNNNSEIALSLSRNKVFVFFDLTVDDQSVYPKALRD

SEQ ID NO: 5363 - protein, 40 aa, Artificial Sequence
  Description of Artificial Sequence: Synthetic polypeptide
NNSEIALSLSRNKVFVFFDLTVDDQSVYPKALRDEYIMSK

SEQ ID NO: 5364 - protein, 40 aa, Artificial Sequence
  Description of Artificial Sequence: Synthetic polypeptide
IALSLSRNKVFVFFDLTVDDQSVYPKALRDEYIMSKTLGS

SEQ ID NO: 5365 - protein, 40 aa, Artificial Sequence
  Description of Artificial Sequence: Synthetic polypeptide
RNKVFVFFDLTVDDQSVYPKALRDEYIMSKTLGSGACGEV

SEQ ID NO: 5366 - protein, 40 aa, Artificial Sequence
  Description of Artificial Sequence: Synthetic polypeptide
NKVFVFFDLTVDDQSVYPKALRDEYIMSKTLGSGACGEVK

SEQ ID NO: 5367 - protein, 40 aa, Artificial Sequence
  Description of Artificial Sequence: Synthetic polypeptide
VFVFFDLTVDDQSVYPKALRDEYIMSKTLGSGACGEVKLA

SEQ ID NO: 5368 - protein, 40 aa, Artificial Sequence
  Description of Artificial Sequence: Synthetic polypeptide
FVFFDLTVDDQSVYPKALRDEYIMSKTLGSGACGEVKLAF

SEQ ID NO: 5369 - protein, 40 aa, Artificial Sequence
  Description of Artificial Sequence: Synthetic polypeptide
VFFDLTVDDQSVYPKALRDEYIMSKTLGSGACGEVKLAFE

SEQ ID NO: 5370 - protein, 40 aa, Artificial Sequence
  Description of Artificial Sequence: Synthetic polypeptide
TVDDQSVYPKALRDEYIMSKTLGSGACGEVKLAFERKTCK

SEQ ID NO: 5371 - protein, 40 aa, Artificial Sequence
  Description of Artificial Sequence: Synthetic polypeptide
YPKALRDEYIMSKTLGSGACGEVKLAFERKTCKKVAIKII

SEQ ID NO: 5372 - protein, 40 aa, Artificial Sequence
  Description of Artificial Sequence: Synthetic polypeptide
ALRDEYIMSKTLGSGACGEVKLAFERKTCKKVAIKIISKR

SEQ ID NO: 5373 - protein, 40 aa, Artificial Sequence
  Description of Artificial Sequence: Synthetic polypeptide
FERKTCKKVAIKIISKRKFAIGSAREADPALNVETEIEIL

SEQ ID NO: 5374 - protein, 40 aa, Artificial Sequence
  Description of Artificial Sequence: Synthetic polypeptide
KKVAIKIISKRKFAIGSAREADPALNVETEIEILKKLNHP

SEQ ID NO: 5375 - protein, 40 aa, Artificial Sequence
  Description of Artificial Sequence: Synthetic polypeptide
KVAIKIISKRKFAIGSAREADPALNVETEIEILKKLNHPC

SEQ ID NO: 5376 - protein, 40 aa, Artificial Sequence
  Description of Artificial Sequence: Synthetic polypeptide
KRKFAIGSAREADPALNVETEIEILKKLNHPCIIKIKNFF

SEQ ID NO: 5377 - protein, 40 aa, Artificial Sequence
  Description of Artificial Sequence: Synthetic polypeptide
RKFAIGSAREADPALNVETEIEILKKLNHPCIIKIKNFFD

SEQ ID NO: 5378 - protein, 40 aa, Artificial Sequence
  Description of Artificial Sequence: Synthetic polypeptide
KFAIGSAREADPALNVETEIEILKKLNHPCIIKIKNFFDA

SEQ ID NO: 5379 - protein, 40 aa, Artificial Sequence
  Description of Artificial Sequence: Synthetic polypeptide
FAIGSAREADPALNVETEIEILKKLNHPCIIKIKNFFDAE

SEQ ID NO: 5380 - protein, 40 aa, Artificial Sequence
  Description of Artificial Sequence: Synthetic polypeptide
AIGSAREADPALNVETEIEILKKLNHPCIIKIKNFFDAED

SEQ ID NO: 5381 - protein, 40 aa, Artificial Sequence
  Description of Artificial Sequence: Synthetic polypeptide
GSAREADPALNVETEIEILKKLNHPCIIKIKNFFDAEDYY

SEQ ID NO: 5382 - protein, 40 aa, Artificial Sequence
  Description of Artificial Sequence: Synthetic polypeptide
AREADPALNVETEIEILKKLNHPCIIKIKNFFDAEDYYIV

SEQ ID NO: 5383 - protein, 40 aa, Artificial Sequence
  Description of Artificial Sequence: Synthetic polypeptide
EADPALNVETEIEILKKLNHPCIIKIKNFFDAEDYYIVLE

SEQ ID NO: 5384 - protein, 40 aa, Artificial Sequence
  Description of Artificial Sequence: Synthetic polypeptide
PALNVETEIEILKKLNHPCIIKIKNFFDAEDYYIVLELME

SEQ ID NO: 5385 - protein, 40 aa, Artificial Sequence
  Description of Artificial Sequence: Synthetic polypeptide
LNVETEIEILKKLNHPCIIKIKNFFDAEDYYIVLELMEGG

SEQ ID NO: 5386 - protein, 40 aa, Artificial Sequence
  Description of Artificial Sequence: Synthetic polypeptide
NVETEIEILKKLNHPCIIKIKNFFDAEDYYIVLELMEGGE

SEQ ID NO: 5387 - protein, 40 aa, Artificial Sequence
  Description of Artificial Sequence: Synthetic polypeptide
VETEIEILKKLNHPCIIKIKNFFDAEDYYIVLELMEGGEL

SEQ ID NO: 5388 - protein, 40 aa, Artificial Sequence
  Description of Artificial Sequence: Synthetic polypeptide
TEIEILKKLNHPCIIKIKNFFDAEDYYIVLELMEGGELFD

SEQ ID NO: 5389 - protein, 40 aa, Artificial Sequence
  Description of Artificial Sequence: Synthetic polypeptide
EIEILKKLNHPCIIKIKNFFDAEDYYIVLELMEGGELFDK

SEQ ID NO: 5390 - protein, 40 aa, Artificial Sequence
  Description of Artificial Sequence: Synthetic polypeptide
IEILKKLNHPCIIKIKNFFDAEDYYIVLELMEGGELFDKV

SEQ ID NO: 5391 - protein, 40 aa, Artificial Sequence
  Description of Artificial Sequence: Synthetic polypeptide
KKLNHPCIIKIKNFFDAEDYYIVLELMEGGELFDKVVGNK

SEQ ID NO: 5392 - protein, 40 aa, Artificial Sequence
  Description of Artificial Sequence: Synthetic polypeptide
LNHPCIIKIKNFFDAEDYYIVLELMEGGELFDKVVGNKRL

SEQ ID NO: 5393 - protein, 40 aa, Artificial Sequence
  Description of Artificial Sequence: Synthetic polypeptide
NHPCIIKIKNFFDAEDYYIVLELMEGGELFDKVVGNKRLK

SEQ ID NO: 5394 - protein, 40 aa, Artificial Sequence
  Description of Artificial Sequence: Synthetic polypeptide
PCIIKIKNFFDAEDYYIVLELMEGGELFDKVVGNKRLKEA

SEQ ID NO: 5395 - protein, 40 aa, Artificial Sequence
  Description of Artificial Sequence: Synthetic polypeptide
CIIKIKNFFDAEDYYIVLELMEGGELFDKVVGNKRLKEAT

SEQ ID NO: 5396 - protein, 40 aa, Artificial Sequence
  Description of Artificial Sequence: Synthetic polypeptide
IIKIKNFFDAEDYYIVLELMEGGELFDKVVGNKRLKEATC

SEQ ID NO: 5397 - protein, 40 aa, Artificial Sequence
  Description of Artificial Sequence: Synthetic polypeptide
KIKNFFDAEDYYIVLELMEGGELFDKVVGNKRLKEATCKL

SEQ ID NO: 5398 - protein, 40 aa, Artificial Sequence
  Description of Artificial Sequence: Synthetic polypeptide
IKNFFDAEDYYIVLELMEGGELFDKVVGNKRLKEATCKLY

SEQ ID NO: 5399 - protein, 40 aa, Artificial Sequence
  Description of Artificial Sequence: Synthetic polypeptide
NFFDAEDYYIVLELMEGGELFDKVVGNKRLKEATCKLYFY

SEQ ID NO: 5400 - protein, 40 aa, Artificial Sequence
  Description of Artificial Sequence: Synthetic polypeptide
DAEDYYIVLELMEGGELFDKVVGNKRLKEATCKLYFYQML

SEQ ID NO: 5401 - protein, 40 aa, Artificial Sequence
  Description of Artificial Sequence: Synthetic polypeptide
AEDYYIVLELMEGGELFDKVVGNKRLKEATCKLYFYQMLL

SEQ ID NO: 5402 - protein, 40 aa, Artificial Sequence
  Description of Artificial Sequence: Synthetic polypeptide
DYYIVLELMEGGELFDKVVGNKRLKEATCKLYFYQMLLAV

SEQ ID NO: 5403 - protein, 40 aa, Artificial Sequence
  Description of Artificial Sequence: Synthetic polypeptide
YIVLELMEGGELFDKVVGNKRLKEATCKLYFYQMLLAVQY

SEQ ID NO: 5404 - protein, 40 aa, Artificial Sequence
  Description of Artificial Sequence: Synthetic polypeptide
IVLELMEGGELFDKVVGNKRLKEATCKLYFYQMLLAVQYL

SEQ ID NO: 5405 - protein, 40 aa, Artificial Sequence
  Description of Artificial Sequence: Synthetic polypeptide
EGGELFDKVVGNKRLKEATCKLYFYQMLLAVQYLHENGII

SEQ ID NO: 5406 - protein, 40 aa, Artificial Sequence
  Description of Artificial Sequence: Synthetic polypeptide
GGELFDKVVGNKRLKEATCKLYFYQMLLAVQYLHENGIIH

SEQ ID NO: 5407 - protein, 40 aa, Artificial Sequence
  Description of Artificial Sequence: Synthetic polypeptide
GELFDKVVGNKRLKEATCKLYFYQMLLAVQYLHENGIIHR

SEQ ID NO: 5408 - protein, 40 aa, Artificial Sequence
  Description of Artificial Sequence: Synthetic polypeptide
FDKVVGNKRLKEATCKLYFYQMLLAVQYLHENGIIHRDLK

SEQ ID NO: 5409 - protein, 40 aa, Artificial Sequence
  Description of Artificial Sequence: Synthetic polypeptide
MKEATCKLYFYQMLLAVQYLHENGIIHRDLKPENVLLSSQ

SEQ ID NO: 5410 - protein, 40 aa, Artificial Sequence
  Description of Artificial Sequence: Synthetic polypeptide
SQEEDCLIKITDFGHSKILGETSLMRTLCGTPTYLAPEVL

SEQ ID NO: 5411 - protein, 40 aa, Artificial Sequence
  Description of Artificial Sequence: Synthetic polypeptide
QEEDCLIKITDFGHSKILGETSLMRTLCGTPTYLAPEVLV

SEQ ID NO: 5412 - protein, 40 aa, Artificial Sequence
  Description of Artificial Sequence: Synthetic polypeptide
EEDCLIKITDFGHSKILGETSLMRTLCGTPTYLAPEVLVS

SEQ ID NO: 5413 - protein, 40 aa, Artificial Sequence
  Description of Artificial Sequence: Synthetic polypeptide
EDCLIKITDFGHSKILGETSLMRTLCGTPTYLAPEVLVSV

SEQ ID NO: 5414 - protein, 40 aa, Artificial Sequence
  Description of Artificial Sequence: Synthetic polypeptide
DCLIKITDFGHSKILGETSLMRTLCGTPTYLAPEVLVSVG

SEQ ID NO: 5415 - protein, 40 aa, Artificial Sequence
  Description of Artificial Sequence: Synthetic polypeptide
CLIKITDFGHSKILGETSLMRTLCGTPTYLAPEVLVSVGT

SEQ ID NO: 5416 - protein, 40 aa, Artificial Sequence
  Description of Artificial Sequence: Synthetic polypeptide
LIKITDFGHSKILGETSLMRTLCGTPTYLAPEVLVSVGTA

SEQ ID NO: 5417 - protein, 40 aa, Artificial Sequence
  Description of Artificial Sequence: Synthetic polypeptide
KITDFGHSKILGETSLMRTLCGTPTYLAPEVLVSVGTAGY

SEQ ID NO: 5418 - protein, 40 aa, Artificial Sequence
  Description of Artificial Sequence: Synthetic polypeptide
ILGETSLMRTLCGTPTYLAPEVLVSVGTAGYNRAVDCWSL

SEQ ID NO: 5419 - protein, 40 aa, Artificial Sequence
  Description of Artificial Sequence: Synthetic polypeptide
ETSLMRTLCGTPTYLAPEVLVSVGTAGYNRAVDCWSLGVI

SEQ ID NO: 5420 - protein, 40 aa, Artificial Sequence
  Description of Artificial Sequence: Synthetic polypeptide
MRTLCGTPTYLAPEVLVSVGTAGYNRAVDCWSLGVILFIC

SEQ ID NO: 5421 - protein, 40 aa, Artificial Sequence
  Description of Artificial Sequence: Synthetic polypeptide
GTPTYLAPEVLVSVGTAGYNRAVDCWSLGVILFICLSGYP

SEQ ID NO: 5422 - protein, 40 aa, Artificial Sequence
  Description of Artificial Sequence: Synthetic polypeptide
APEVLVSVGTAGYNRAVDCWSLGVILFICLSGYPPFSEHR

SEQ ID NO: 5423 - protein, 40 aa, Artificial Sequence
  Description of Artificial Sequence: Synthetic polypeptide
EVLVSVGTAGYNRAVDCWSLGVILFICLSGYPPFSEHRTQ

SEQ ID NO: 5424 - protein, 40 aa, Artificial Sequence
  Description of Artificial Sequence: Synthetic polypeptide
VLVSVGTAGYNRAVDCWSLGVILFICLSGYPPFSEHRTQV

SEQ ID NO: 5425 - protein, 40 aa, Artificial Sequence
  Description of Artificial Sequence: Synthetic polypeptide
VSVGTAGYNRAVDCWSLGVILFICLSGYPPFSEHRTQVSL

SEQ ID NO: 5426 - protein, 40 aa, Artificial Sequence
  Description of Artificial Sequence: Synthetic polypeptide
GYNRAVDCWSLGVILFICLSGYPPFSEHRTQVSLKDQITS

SEQ ID NO: 5427 - protein, 40 aa, Artificial Sequence
  Description of Artificial Sequence: Synthetic polypeptide
YNRAVDCWSLGVILFICLSGYPPFSEHRTQVSLKDQITSG

SEQ ID NO: 5428 - protein, 40 aa, Artificial Sequence
  Description of Artificial Sequence: Synthetic polypeptide
DCWSLGVILFICLSGYPPFSEHRTQVSLKDQITSGKYNFI

SEQ ID NO: 5429 - protein, 40 aa, Artificial Sequence
  Description of Artificial Sequence: Synthetic polypeptide
CWSLGVILFICLSGYPPFSEHRTQVSLKDQITSGKYNFIP

SEQ ID NO: 5430 - protein, 40 aa, Artificial Sequence
  Description of Artificial Sequence: Synthetic polypeptide
WSLGVILFICLSGYPPFSEHRTQVSLKDQITSGKYNFIPE

SEQ ID NO: 5431 - protein, 40 aa, Artificial Sequence
  Description of Artificial Sequence: Synthetic polypeptide
LGVILFICLSGYPPFSEHRTQVSLKDQITSGKYNFIPEVW

SEQ ID NO: 5432 - protein, 40 aa, Artificial Sequence
  Description of Artificial Sequence: Synthetic polypeptide
VILFICLSGYPPFSEHRTQVSLKDQITSGKYNFIPEVWAE

SEQ ID NO: 5433 - protein, 40 aa, Artificial Sequence
  Description of Artificial Sequence: Synthetic polypeptide
VSLKDQITSGKYNFIPEVWAEVSEKALDLVKKLLVVDPKA

SEQ ID NO: 5434 - protein, 40 aa, Artificial Sequence
  Description of Artificial Sequence: Synthetic polypeptide
TSGKYNFIPEVWAEVSEKALDLVKKLLVVDPKARFTTEEA

SEQ ID NO: 5435 - protein, 40 aa, Artificial Sequence
  Description of Artificial Sequence: Synthetic polypeptide
SGKYNFIPEVWAEVSEKALDLVKKLLVVDPKARFTTEEAL

SEQ ID NO: 5436 - protein, 40 aa, Artificial Sequence
  Description of Artificial Sequence: Synthetic polypeptide
PEVWAEVSEKALDLVKKLLVVDPKARFTTEEALRHPWLQD

SEQ ID NO: 5437 - protein, 40 aa, Artificial Sequence
  Description of Artificial Sequence: Synthetic polypeptide
VWAEVSEKALDLVKKLLVVDPKARFTTEEALRHPWLQDED

SEQ ID NO: 5438 - protein, 40 aa, Artificial Sequence
  Description of Artificial Sequence: Synthetic polypeptide
AEVSEKALDLVKKLLVVDPKARFTTEEALRHPWLQDEDMK

SEQ ID NO: 5439 - protein, 40 aa, Artificial Sequence
  Description of Artificial Sequence: Synthetic polypeptide
EVSEKALDLVKKLLVVDPKARFTTEEALRHPWLQDEDMKR

SEQ ID NO: 5440 - protein, 40 aa, Artificial Sequence
  Description of Artificial Sequence: Synthetic polypeptide
SEKALDLVKKLLVVDPKARFTTEEALRHPWLQDEDMKRKF

SEQ ID NO: 5441 - protein, 40 aa, Artificial Sequence
  Description of Artificial Sequence: Synthetic polypeptide
EKALDLVKKLLVVDPKARFTTEEALRHPWLQDEDMKRKFQ

SEQ ID NO: 5442 - protein, 40 aa, Artificial Sequence
  Description of Artificial Sequence: Synthetic polypeptide
KALDLVKKLLVVDPKARFTTEEALRHPWLQDEDMKRKFQD

SEQ ID NO: 5443 - protein, 40 aa, Artificial Sequence
  Description of Artificial Sequence: Synthetic polypeptide
DLVKKLLVVDPKARFTTEEALRHPWLQDEDMKRKFQDLLS

SEQ ID NO: 5444 - protein, 40 aa, Artificial Sequence
  Description of Artificial Sequence: Synthetic polypeptide
FTTEEALRHPWLQDEDMKRKFQDLLSEENESTALPQVLAQ

SEQ ID NO: 5445 - protein, 40 aa, Artificial Sequence
  Description of Artificial Sequence: Synthetic polypeptide
EEALRHPWLQDEDMKRKFQDLLSEENESTALPQVLAQPST

SEQ ID NO: 5446 - protein, 40 aa, Artificial Sequence
  Description of Artificial Sequence: Synthetic polypeptide
KRKFQDLLSEENESTALPQVLAQPSTSRKRPREGEAEGAE

SEQ ID NO: 5447 - protein, 40 aa, Artificial Sequence
  Description of Artificial Sequence: Synthetic polypeptide
KFQDLLSEENESTALPQVLAQPSTSRKRPREGEAEGAETT

SEQ ID NO: 5448 - protein, 40 aa, Artificial Sequence
  Description of Artificial Sequence: Synthetic polypeptide
SEENESTALPQVLAQPSTSRKRPREGEAEGAETTKRPAVC

SEQ ID NO: 5449 - protein, 40 aa, Artificial Sequence
  Description of Artificial Sequence: Synthetic polypeptide
EENESTALPQVLAQPSTSRKRPREGEAEGAETTKRPAVCA

SEQ ID NO: 5450 - protein, 40 aa, Artificial Sequence
  Description of Artificial Sequence: Synthetic polypeptide
ENESTALPQVLAQPSTSRKRPREGEAEGAETTKRPAVCAA

SEQ ID NO: 5451 - protein, 40 aa, Artificial Sequence
  Description of Artificial Sequence: Synthetic polypeptide
YQDDAELATRAIPELTKLLNDEDQVVVNKAAVMVHQLSKK

SEQ ID NO: 5452 - protein, 40 aa, Artificial Sequence
  Description of Artificial Sequence: Synthetic polypeptide
LATRAIPELTKLLNDEDQVVVNKAAVMVHQLSKKEASRHA

SEQ ID NO: 5453 - protein, 40 aa, Artificial Sequence
  Description of Artificial Sequence: Synthetic polypeptide
ATRAIPELTKLLNDEDQVVVNKAAVMVHQLSKKEASRHAI

SEQ ID NO: 5454 - protein, 40 aa, Artificial Sequence
  Description of Artificial Sequence: Synthetic polypeptide
VLFYAITTLHNLLLHQEGAKMAVRLAGGLQKMVALLNKTN

SEQ ID NO: 5455 - protein, 40 aa, Artificial Sequence
  Description of Artificial Sequence: Synthetic polypeptide
AITTLHNLLLHQEGAKMAVRLAGGLQKMVALLNKTNVKFL

SEQ ID NO: 5456 - protein, 40 aa, Artificial Sequence
  Description of Artificial Sequence: Synthetic polypeptide
TLHNLLLHQEGAKMAVRLAGGLQKMVALLNKTNVKFLAIT

SEQ ID NO: 5457 - protein, 40 aa, Artificial Sequence
  Description of Artificial Sequence: Synthetic polypeptide
LHNLLLHQEGAKMAVRLAGGLQKMVALLNKTNVKFLAITT

SEQ ID NO: 5458 - protein, 40 aa, Artificial Sequence
  Description of Artificial Sequence: Synthetic polypeptide
LAGGLQKMVALLNKTNVKFLAITTDCLQILAYGNQESKLI

SEQ ID NO: 5459 - protein, 40 aa, Artificial Sequence
  Description of Artificial Sequence: Synthetic polypeptide
GGLQKMVALLNKTNVKFLAITTDCLQILAYGNQESKLIIL

SEQ ID NO: 5460 - protein, 40 aa, Artificial Sequence
  Description of Artificial Sequence: Synthetic polypeptide
KTNVKFLAITTDCLQILAYGNQESKLIILASGGPQALVNI

SEQ ID NO: 5461 - protein, 40 aa, Artificial Sequence
  Description of Artificial Sequence: Synthetic polypeptide
NVKFLAITTDCLQILAYGNQESKLIILASGGPQALVNIMR

SEQ ID NO: 5462 - protein, 40 aa, Artificial Sequence
  Description of Artificial Sequence: Synthetic polypeptide
FLAITTDCLQILAYGNQESKLIILASGGPQALVNIMRTYT

SEQ ID NO: 5463 - protein, 40 aa, Artificial Sequence
  Description of Artificial Sequence: Synthetic polypeptide
QILAYGNQESKLIILASGGPQALVNIMRTYTYEKLLWTTS

SEQ ID NO: 5464 - protein, 40 aa, Artificial Sequence
  Description of Artificial Sequence: Synthetic polypeptide
LAYGNQESKLIILASGGPQALVNIMRTYTYEKLLWTTSRV

SEQ ID NO: 5465 - protein, 40 aa, Artificial Sequence
  Description of Artificial Sequence: Synthetic polypeptide
SKLIILASGGPQALVNIMRTYTYEKLLWTTSRVLKVLSVC

SEQ ID NO: 5466 - protein, 40 aa, Artificial Sequence
  Description of Artificial Sequence: Synthetic polypeptide
IILASGGPQALVNIMRTYTYEKLLWTTSRVLKVLSVCSSN

SEQ ID NO: 5467 - protein, 40 aa, Artificial Sequence
  Description of Artificial Sequence: Synthetic polypeptide
ILASGGPQALVNIMRTYTYEKLLWTTSRVLKVLSVCSSNK

SEQ ID NO: 5468 - protein, 40 aa, Artificial Sequence
  Description of Artificial Sequence: Synthetic polypeptide
SGGPQALVNIMRTYTYEKLLWTTSRVLKVLSVCSSNKPAI

SEQ ID NO: 5469 - protein, 40 aa, Artificial Sequence
  Description of Artificial Sequence: Synthetic polypeptide
GGPQALVNIMRTYTYEKLLWTTSRVLKVLSVCSSNKPAIV

SEQ ID NO: 5470 - protein, 40 aa, Artificial Sequence
  Description of Artificial Sequence: Synthetic polypeptide
PQALVNIMRTYTYEKLLWTTSRVLKVLSVCSSNKPAIVEA

SEQ ID NO: 5471 - protein, 40 aa, Artificial Sequence
  Description of Artificial Sequence: Synthetic polypeptide
VNIMRTYTYEKLLWTTSRVLKVLSVCSSNKPAIVEAGGMQ

SEQ ID NO: 5472 - protein, 40 aa, Artificial Sequence
  Description of Artificial Sequence: Synthetic polypeptide
LSVCSSNKPAIVEAGGMQALGLHLTDPSQRLVQNCLWTLR

SEQ ID NO: 5473 - protein, 40 aa, Artificial Sequence
  Description of Artificial Sequence: Synthetic polypeptide
CSSNKPAIVEAGGMQALGLHLTDPSQRLVQNCLWTLRNLS

SEQ ID NO: 5474 - protein, 40 aa, Artificial Sequence
  Description of Artificial Sequence: Synthetic polypeptide
KQEGMEGLLGTLVQLLGSDDINVVTCAAGILSNLTCNNYK

SEQ ID NO: 5475 - protein, 40 aa, Artificial Sequence
  Description of Artificial Sequence: Synthetic polypeptide
QEGMEGLLGTLVQLLGSDDINVVTCAAGILSNLTCNNYKN

SEQ ID NO: 5476 - protein, 40 aa, Artificial Sequence
  Description of Artificial Sequence: Synthetic polypeptide
EGMEGLLGTLVQLLGSDDINVVTCAAGILSNLTCNNYKNK

SEQ ID NO: 5477 - protein, 40 aa, Artificial Sequence
  Description of Artificial Sequence: Synthetic polypeptide
GMEGLLGTLVQLLGSDDINVVTCAAGILSNLTCNNYKNKM

SEQ ID NO: 5478 - protein, 40 aa, Artificial Sequence
  Description of Artificial Sequence: Synthetic polypeptide
MEGLLGTLVQLLGSDDINVVTCAAGILSNLTCNNYKNKMM

SEQ ID NO: 5479 - protein, 40 aa, Artificial Sequence
  Description of Artificial Sequence: Synthetic polypeptide
GLLGTLVQLLGSDDINVVTCAAGILSNLTCNNYKNKMMVC

SEQ ID NO: 5480 - protein, 40 aa, Artificial Sequence
  Description of Artificial Sequence: Synthetic polypeptide
LLGSDDINVVTCAAGILSNLTCNNYKNKMMVCQVGGIEAL

SEQ ID NO: 5481 - protein, 40 aa, Artificial Sequence
  Description of Artificial Sequence: Synthetic polypeptide
DINVVTCAAGILSNLTCNNYKNKMMVCQVGGIEALVRTVL

SEQ ID NO: 5482 - protein, 40 aa, Artificial Sequence
  Description of Artificial Sequence: Synthetic polypeptide
TCAAGILSNLTCNNYKNKMMVCQVGGIEALVRTVLRAGDR

SEQ ID NO: 5483 - protein, 40 aa, Artificial Sequence
  Description of Artificial Sequence: Synthetic polypeptide
CQVGGIEALVRTVLRAGDREDITEPAICALRHLTSRHQEA

SEQ ID NO: 5484 - protein, 40 aa, Artificial Sequence
  Description of Artificial Sequence: Synthetic polypeptide
CALRHLTSRHQEAEMAQNAVRLHYGLPVVVKLLHPPSHWP

SEQ ID NO: 5485 - protein, 40 aa, Artificial Sequence
  Description of Artificial Sequence: Synthetic polypeptide
ANHAPLREQGAIPRLVQLLVRAHQDTQRRTSMGGTQQQFV

SEQ ID NO: 5486 - protein, 40 aa, Artificial Sequence
  Description of Artificial Sequence: Synthetic polypeptide
REQGAIPRLVQLLVRAHQDTQRRTSMGGTQQQFVEGVRME

SEQ ID NO: 5487 - protein, 40 aa, Artificial Sequence
  Description of Artificial Sequence: Synthetic polypeptide
GAIPRLVQLLVRAHQDTQRRTSMGGTQQQFVEGVRMEEIV

SEQ ID NO: 5488 - protein, 40 aa, Artificial Sequence
  Description of Artificial Sequence: Synthetic polypeptide
PRLVQLLVRAHQDTQRRTSMGGTQQQFVEGVRMEEIVEGC

SEQ ID NO: 5489 - protein, 40 aa, Artificial Sequence
  Description of Artificial Sequence: Synthetic polypeptide
MLVRAHQDTQRRTSMGGTQQQFVEGVRMEEIVEGCTGALH

SEQ ID NO: 5490 - protein, 40 aa, Artificial Sequence
  Description of Artificial Sequence: Synthetic polypeptide
LNTIPLFVQLLYSPIENIQRVAAGVLCELAQDKEAAEAIE

SEQ ID NO: 5491 - protein, 40 aa, Artificial Sequence
  Description of Artificial Sequence: Synthetic polypeptide
NTIPLFVQLLYSPIENIQRVAAGVLCELAQDKEAAEAIEA

SEQ ID NO: 5492 - protein, 40 aa, Artificial Sequence
  Description of Artificial Sequence: Synthetic polypeptide
QLLYSPIENIQRVAAGVLCELAQDKEAAEAIEAEGATAPL

SEQ ID NO: 5493 - protein, 40 aa, Artificial Sequence
  Description of Artificial Sequence: Synthetic polypeptide
MLYSPIENIQRVAAGVLCELAQDKEAAEAIEAEGATAPLT

SEQ ID NO: 5494 - protein, 40 aa, Artificial Sequence
  Description of Artificial Sequence: Synthetic polypeptide
YSPIENIQRVAAGVLCELAQDKEAAEAIEAEGATAPLTEL

SEQ ID NO: 5495 - protein, 40 aa, Artificial Sequence
  Description of Artificial Sequence: Synthetic polypeptide
SPIENIQRVAAGVLCELAQDKEAAEAIEAEGATAPLTELL

SEQ ID NO: 5496 - protein, 40 aa, Artificial Sequence
  Description of Artificial Sequence: Synthetic polypeptide
ENIQRVAAGVLCELAQDKEAAEAIEAEGATAPLTELLHSR

SEQ ID NO: 5497 - protein, 40 aa, Artificial Sequence
  Description of Artificial Sequence: Synthetic polypeptide
RVAAGVLCELAQDKEAAEAIEAEGATAPLTELLHSRNEGV

SEQ ID NO: 5498 - protein, 40 aa, Artificial Sequence
  Description of Artificial Sequence: Synthetic polypeptide
AQDKEAAEAIEAEGATAPLTELLHSRNEGVATYAAAVLFR

SEQ ID NO: 5499 - protein, 40 aa, Artificial Sequence
  Description of Artificial Sequence: Synthetic polypeptide
DKEAAEAIEAEGATAPLTELLHSRNEGVATYAAAVLFRMS

SEQ ID NO: 5500 - protein, 40 aa, Artificial Sequence
  Description of Artificial Sequence: Synthetic polypeptide
APLTELLHSRNEGVATYAAAVLFRMSEDKPQDYKKRLSVE

SEQ ID NO: 5501 - protein, 40 aa, Artificial Sequence
  Description of Artificial Sequence: Synthetic polypeptide
ELLHSRNEGVATYAAAVLFRMSEDKPQDYKKRLSVELTSS

SEQ ID NO: 5502 - protein, 40 aa, Artificial Sequence
  Description of Artificial Sequence: Synthetic polypeptide
ETADLGLDIGAQGEPLGYRQDDPSYRSFHSGGYGQDALGM

SEQ ID NO: 5503 - protein, 40 aa, Artificial Sequence
  Description of Artificial Sequence: Synthetic polypeptide
ALGLDQQFAGLDLNSSDNQSGGSTASKGRYIPPHLRNREA

SEQ ID NO: 5504 - protein, 40 aa, Artificial Sequence
  Description of Artificial Sequence: Synthetic polypeptide
QFAGLDLNSSDNQSGGSTASKGRYIPPHLRNREATKGFYD

SEQ ID NO: 5505 - protein, 40 aa, Artificial Sequence
  Description of Artificial Sequence: Synthetic polypeptide
GLDLNSSDNQSGGSTASKGRYIPPHLRNREATKGFYDKDS

SEQ ID NO: 5506 - protein, 40 aa, Artificial Sequence
  Description of Artificial Sequence: Synthetic polypeptide
NSSDNQSGGSTASKGRYIPPHLRNREATKGFYDKDSSGWS

SEQ ID NO: 5507 - protein, 40 aa, Artificial Sequence
  Description of Artificial Sequence: Synthetic polypeptide
ASKGRYIPPHLRNREATKGFYDKDSSGWSSSKDKDAYSSF

SEQ ID NO: 5508 - protein, 40 aa, Artificial Sequence
  Description of Artificial Sequence: Synthetic polypeptide
KGRYIPPHLRNREATKGFYDKDSSGWSSSKDKDAYSSFGS

SEQ ID NO: 5509 - protein, 40 aa, Artificial Sequence
  Description of Artificial Sequence: Synthetic polypeptide
GRYIPPHLRNREATKGFYDKDSSGWSSSKDKDAYSSFGSR

SEQ ID NO: 5510 - protein, 40 aa, Artificial Sequence
  Description of Artificial Sequence: Synthetic polypeptide
YIPPHLRNREATKGFYDKDSSGWSSSKDKDAYSSFGSRSD

SEQ ID NO: 5511 - protein, 40 aa, Artificial Sequence
  Description of Artificial Sequence: Synthetic polypeptide
HLRNREATKGFYDKDSSGWSSSKDKDAYSSFGSRSDSRGK

SEQ ID NO: 5512 - protein, 40 aa, Artificial Sequence
  Description of Artificial Sequence: Synthetic polypeptide
ATKGFYDKDSSGWSSSKDKDAYSSFGSRSDSRGKSSFFSD

SEQ ID NO: 5513 - protein, 40 aa, Artificial Sequence
  Description of Artificial Sequence: Synthetic polypeptide
TKGFYDKDSSGWSSSKDKDAYSSFGSRSDSRGKSSFFSDR

SEQ ID NO: 5514 - protein, 40 aa, Artificial Sequence
  Description of Artificial Sequence: Synthetic polypeptide
DSSGWSSSKDKDAYSSFGSRSDSRGKSSFFSDRGSGSRGR

SEQ ID NO: 5515 - protein, 40 aa, Artificial Sequence
  Description of Artificial Sequence: Synthetic polypeptide
SSGWSSSKDKDAYSSFGSRSDSRGKSSFFSDRGSGSRGRF

SEQ ID NO: 5516 - protein, 40 aa, Artificial Sequence
  Description of Artificial Sequence: Synthetic polypeptide
GWSSSKDKDAYSSFGSRSDSRGKSSFFSDRGSGSRGRFDD

SEQ ID NO: 5517 - protein, 40 aa, Artificial Sequence
  Description of Artificial Sequence: Synthetic polypeptide
PSERLEQELFSGGNTGINFEKYDDIPVEATGNNCPPHIES

SEQ ID NO: 5518 - protein, 40 aa, Artificial Sequence
  Description of Artificial Sequence: Synthetic polypeptide
RLEQELFSGGNTGINFEKYDDIPVEATGNNCPPHIESFSD

SEQ ID NO: 5519 - protein, 40 aa, Artificial Sequence
  Description of Artificial Sequence: Synthetic polypeptide
IPVEATGNNCPPHIESFSDVEMGEIIMGNIELTRYTRPTP

SEQ ID NO: 5520 - protein, 40 aa, Artificial Sequence
  Description of Artificial Sequence: Synthetic polypeptide
GNNCPPHIESFSDVEMGEIIMGNIELTRYTRPTPVQKHAI

SEQ ID NO: 5521 - protein, 40 aa, Artificial Sequence
  Description of Artificial Sequence: Synthetic polypeptide
IESFSDVEMGEIIMGNIELTRYTRPTPVQKHAIPIIKEKR

SEQ ID NO: 5522 - protein, 40 aa, Artificial Sequence
  Description of Artificial Sequence: Synthetic polypeptide
VEMGEIIMGNIELTRYTRPTPVQKHAIPIIKEKRDLMACA

SEQ ID NO: 5523 - protein, 40 aa, Artificial Sequence
  Description of Artificial Sequence: Synthetic polypeptide
EMGEIIMGNIELTRYTRPTPVQKHAIPIIKEKRDLMACAQ

SEQ ID NO: 5524 - protein, 40 aa, Artificial Sequence
  Description of Artificial Sequence: Synthetic polypeptide
EIIMGNIELTRYTRPTPVQKHAIPIIKEKRDLMACAQTGS

SEQ ID NO: 5525 - protein, 40 aa, Artificial Sequence
  Description of Artificial Sequence: Synthetic polypeptide
MGNIELTRYTRPTPVQKHAIPIIKEKRDLMACAQTGSGKT

SEQ ID NO: 5526 - protein, 40 aa, Artificial Sequence
  Description of Artificial Sequence: Synthetic polypeptide
GNIELTRYTRPTPVQKHAIPIIKEKRDLMACAQTGSGKTA

SEQ ID NO: 5527 - protein, 40 aa, Artificial Sequence
  Description of Artificial Sequence: Synthetic polypeptide
YTRPTPVQKHAIPIIKEKRDLMACAQTGSGKTAAFLLPIL

SEQ ID NO: 5528 - protein, 40 aa, Artificial Sequence
  Description of Artificial Sequence: Synthetic polypeptide
TPVQKHAIPIIKEKRDLMACAQTGSGKTAAFLLPILSQIY

SEQ ID NO: 5529 - protein, 40 aa, Artificial Sequence
  Description of Artificial Sequence: Synthetic polypeptide
IIKEKRDLMACAQTGSGKTAAFLLPILSQIYSDGPGEALR

SEQ ID NO: 5530 - protein, 40 aa, Artificial Sequence
  Description of Artificial Sequence: Synthetic polypeptide
TAAFLLPILSQIYSDGPGEALRAMKENGRYGRRKQYPISL

SEQ ID NO: 5531 - protein, 40 aa, Artificial Sequence
  Description of Artificial Sequence: Synthetic polypeptide
AAFLLPILSQIYSDGPGEALRAMKENGRYGRRKQYPISLV

SEQ ID NO: 5532 - protein, 40 aa, Artificial Sequence
  Description of Artificial Sequence: Synthetic polypeptide
AFLLPILSQIYSDGPGEALRAMKENGRYGRRKQYPISLVL

SEQ ID NO: 5533 - protein, 40 aa, Artificial Sequence
  Description of Artificial Sequence: Synthetic polypeptide
FLLPILSQIYSDGPGEALRAMKENGRYGRRKQYPISLVLA

SEQ ID NO: 5534 - protein, 40 aa, Artificial Sequence
  Description of Artificial Sequence: Synthetic polypeptide
MLPILSQIYSDGPGEALRAMKENGRYGRRKQYPISLVLAP

SEQ ID NO: 5535 - protein, 40 aa, Artificial Sequence
  Description of Artificial Sequence: Synthetic polypeptide
MPILSQIYSDGPGEALRAMKENGRYGRRKQYPISLVLAPT

SEQ ID NO: 5536 - protein, 40 aa, Artificial Sequence
  Description of Artificial Sequence: Synthetic polypeptide
PILSQIYSDGPGEALRAMKENGRYGRRKQYPISLVLAPTR

SEQ ID NO: 5537 - protein, 40 aa, Artificial Sequence
  Description of Artificial Sequence: Synthetic polypeptide
ILSQIYSDGPGEALRAMKENGRYGRRKQYPISLVLAPTRE

SEQ ID NO: 5538 - protein, 40 aa, Artificial Sequence
  Description of Artificial Sequence: Synthetic polypeptide
DGPGEALRAMKENGRYGRRKQYPISLVLAPTRELAVQIYE

SEQ ID NO: 5539 - protein, 40 aa, Artificial Sequence
  Description of Artificial Sequence: Synthetic polypeptide
PGEALRAMKENGRYGRRKQYPISLVLAPTRELAVQIYEEA

SEQ ID NO: 5540 - protein, 40 aa, Artificial Sequence
  Description of Artificial Sequence: Synthetic polypeptide
ALRAMKENGRYGRRKQYPISLVLAPTRELAVQIYEEARKF

SEQ ID NO: 5541 - protein, 40 aa, Artificial Sequence
  Description of Artificial Sequence: Synthetic polypeptide
AMKENGRYGRRKQYPISLVLAPTRELAVQIYEEARKFSYR

SEQ ID NO: 5542 - protein, 40 aa, Artificial Sequence
  Description of Artificial Sequence: Synthetic polypeptide
MKENGRYGRRKQYPISLVLAPTRELAVQIYEEARKFSYRS

SEQ ID NO: 5543 - protein, 40 aa, Artificial Sequence
  Description of Artificial Sequence: Synthetic polypeptide
KENGRYGRRKQYPISLVLAPTRELAVQIYEEARKFSYRSR

SEQ ID NO: 5544 - protein, 40 aa, Artificial Sequence
  Description of Artificial Sequence: Synthetic polypeptide
NGRYGRRKQYPISLVLAPTRELAVQIYEEARKFSYRSRVR

SEQ ID NO: 5545 - protein, 40 aa, Artificial Sequence
  Description of Artificial Sequence: Synthetic polypeptide
RRKQYPISLVLAPTRELAVQIYEEARKFSYRSRVRPCVVY

SEQ ID NO: 5546 - protein, 40 aa, Artificial Sequence
  Description of Artificial Sequence: Synthetic polypeptide
YPISLVLAPTRELAVQIYEEARKFSYRSRVRPCVVYGGAD

SEQ ID NO: 5547 - protein, 40 aa, Artificial Sequence
  Description of Artificial Sequence: Synthetic polypeptide
RGCHLLVATPGRLVDMMERGKIGLDFCKYLVLDEADRMLD

SEQ ID NO: 5548 - protein, 40 aa, Artificial Sequence
  Description of Artificial Sequence: Synthetic polypeptide
MDMGFEPQIRRIVEQDTMPPKGVRHTMMFSATFPKEIQML

SEQ ID NO: 5549 - protein, 40 aa, Artificial Sequence
  Description of Artificial Sequence: Synthetic polypeptide
RRIVEQDTMPPKGVRHTMMFSATFPKEIQMLARDFLDEYI

SEQ ID NO: 5550 - protein, 40 aa, Artificial Sequence
  Description of Artificial Sequence: Synthetic polypeptide
IVEQDTMPPKGVRHTMMFSATFPKEIQMLARDFLDEYIFL

SEQ ID NO: 5551 - protein, 40 aa, Artificial Sequence
  Description of Artificial Sequence: Synthetic polypeptide
DTMPPKGVRHTMMFSATFPKEIQMLARDFLDEYIFLAVGR

SEQ ID NO: 5552 - protein, 40 aa, Artificial Sequence
  Description of Artificial Sequence: Synthetic polypeptide
PPKGVRHTMMFSATFPKEIQMLARDFLDEYIFLAVGRVGS

SEQ ID NO: 5553 - protein, 40 aa, Artificial Sequence
  Description of Artificial Sequence: Synthetic polypeptide
PKGVRHTMMFSATFPKEIQMLARDFLDEYIFLAVGRVGST

SEQ ID NO: 5554 - protein, 40 aa, Artificial Sequence
  Description of Artificial Sequence: Synthetic polypeptide
KGVRHTMMFSATFPKEIQMLARDFLDEYIFLAVGRVGSTS

SEQ ID NO: 5555 - protein, 40 aa, Artificial Sequence
  Description of Artificial Sequence: Synthetic polypeptide
TMMFSATFPKEIQMLARDFLDEYIFLAVGRVGSTSENITQ

SEQ ID NO: 5556 - protein, 40 aa, Artificial Sequence
  Description of Artificial Sequence: Synthetic polypeptide
MFSATFPKEIQMLARDFLDEYIFLAVGRVGSTSENITQKV

SEQ ID NO: 5557 - protein, 40 aa, Artificial Sequence
  Description of Artificial Sequence: Synthetic polypeptide
ATFPKEIQMLARDFLDEYIFLAVGRVGSTSENITQKVVWV

SEQ ID NO: 5558 - protein, 40 aa, Artificial Sequence
  Description of Artificial Sequence: Synthetic polypeptide
FPKEIQMLARDFLDEYIFLAVGRVGSTSENITQKVVWVEE

SEQ ID NO: 5559 - protein, 40 aa, Artificial Sequence
  Description of Artificial Sequence: Synthetic polypeptide
KEIQMLARDFLDEYIFLAVGRVGSTSENITQKVVWVEESD

SEQ ID NO: 5560 - protein, 40 aa, Artificial Sequence
  Description of Artificial Sequence: Synthetic polypeptide
EIQMLARDFLDEYIFLAVGRVGSTSENITQKVVWVEESDK

SEQ ID NO: 5561 - protein, 40 aa, Artificial Sequence
  Description of Artificial Sequence: Synthetic polypeptide
IQMLARDFLDEYIFLAVGRVGSTSENITQKVVWVEESDKR

SEQ ID NO: 5562 - protein, 40 aa, Artificial Sequence
  Description of Artificial Sequence: Synthetic polypeptide
RDFLDEYIFLAVGRVGSTSENITQKVVWVEESDKRSFLLD

SEQ ID NO: 5563 - protein, 40 aa, Artificial Sequence
  Description of Artificial Sequence: Synthetic polypeptide
FLDEYIFLAVGRVGSTSENITQKVVWVEESDKRSFLLDLL

SEQ ID NO: 5564 - protein, 40 aa, Artificial Sequence
  Description of Artificial Sequence: Synthetic polypeptide
IFLAVGRVGSTSENITQKVVWVEESDKRSFLLDLLNATGK

SEQ ID NO: 5565 - protein, 40 aa, Artificial Sequence
  Description of Artificial Sequence: Synthetic polypeptide
RVGSTSENITQKVVWVEESDKRSFLLDLLNATGKDSLTLV

SEQ ID NO: 5566 - protein, 40 aa, Artificial Sequence
  Description of Artificial Sequence: Synthetic polypeptide
KVVWVEESDKRSFLLDLLNATGKDSLTLVFVETKKGADSL

SEQ ID NO: 5567 - protein, 40 aa, Artificial Sequence
  Description of Artificial Sequence: Synthetic polypeptide
ESDKRSFLLDLLNATGKDSLTLVFVETKKGADSLEDFLYH

SEQ ID NO: 5568 - protein, 40 aa, Artificial Sequence
  Description of Artificial Sequence: Synthetic polypeptide
SFLLDLLNATGKDSLTLVFVETKKGADSLEDFLYHEGYAC

SEQ ID NO: 5569 - protein, 40 aa, Artificial Sequence
  Description of Artificial Sequence: Synthetic polypeptide
GKDSLTLVFVETKKGADSLEDFLYHEGYACTSIHGDRSQR

SEQ ID NO: 5570 - protein, 40 aa, Artificial Sequence
  Description of Artificial Sequence: Synthetic polypeptide
NVKHVINFDLPSDIEEYVHRIGRTGRVGNLGLATSFFNER

SEQ ID NO: 5571 - protein, 40 aa, Artificial Sequence
  Description of Artificial Sequence: Synthetic polypeptide
NFDLPSDIEEYVHRIGRTGRVGNLGLATSFFNERNINITK

SEQ ID NO: 5572 - protein, 40 aa, Artificial Sequence
  Description of Artificial Sequence: Synthetic polypeptide
FDLPSDIEEYVHRIGRTGRVGNLGLATSFFNERNINITKD

SEQ ID NO: 5573 - protein, 40 aa, Artificial Sequence
  Description of Artificial Sequence: Synthetic polypeptide
MPSDIEEYVHRIGRTGRVGNLGLATSFFNERNINITKDLL

SEQ ID NO: 5574 - protein, 40 aa, Artificial Sequence
  Description of Artificial Sequence: Synthetic polypeptide
HRIGRTGRVGNLGLATSFFNERNINITKDLLDLLVEAKQE

SEQ ID NO: 5575 - protein, 40 aa, Artificial Sequence
  Description of Artificial Sequence: Synthetic polypeptide
TGRVGNLGLATSFFNERNINITKDLLDLLVEAKQEVPSWL

SEQ ID NO: 5576 - protein, 40 aa, Artificial Sequence
  Description of Artificial Sequence: Synthetic polypeptide
VGNLGLATSFFNERNINITKDLLDLLVEAKQEVPSWLENM

SEQ ID NO: 5577 - protein, 40 aa, Artificial Sequence
  Description of Artificial Sequence: Synthetic polypeptide
GNLGLATSFFNERNINITKDLLDLLVEAKQEVPSWLENMA

SEQ ID NO: 5578 - protein, 40 aa, Artificial Sequence
  Description of Artificial Sequence: Synthetic polypeptide
LGLATSFFNERNINITKDLLDLLVEAKQEVPSWLENMAYE

SEQ ID NO: 5579 - protein, 40 aa, Artificial Sequence
  Description of Artificial Sequence: Synthetic polypeptide
MATSFFNERNINITKDLLDLLVEAKQEVPSWLENMAYEHH

SEQ ID NO: 5580 - protein, 40 aa, Artificial Sequence
  Description of Artificial Sequence: Synthetic polypeptide
TSFFNERNINITKDLLDLLVEAKQEVPSWLENMAYEHHYK

SEQ ID NO: 5581 - protein, 40 aa, Artificial Sequence
  Description of Artificial Sequence: Synthetic polypeptide
NERNINITKDLLDLLVEAKQEVPSWLENMAYEHHYKGSSR

SEQ ID NO: 5582 - protein, 40 aa, Artificial Sequence
  Description of Artificial Sequence: Synthetic polypeptide
PSWLENMAYEHHYKGSSRGRSKSSRFSGGFGARDYRQSSG

SEQ ID NO: 5583 - protein, 40 aa, Artificial Sequence
  Description of Artificial Sequence: Synthetic polypeptide
MQPLSMAGLQLMTPASSPMGPFFGLPWQQEAIHDNIYTPR

SEQ ID NO: 5584 - protein, 40 aa, Artificial Sequence
  Description of Artificial Sequence: Synthetic polypeptide
PLSMAGLQLMTPASSPMGPFFGLPWQQEAIHDNIYTPRKY

SEQ ID NO: 5585 - protein, 40 aa, Artificial Sequence
  Description of Artificial Sequence: Synthetic polypeptide
SMAGLQLMTPASSPMGPFFGLPWQQEAIHDNIYTPRKYQV

SEQ ID NO: 5586 - protein, 40 aa, Artificial Sequence
  Description of Artificial Sequence: Synthetic polypeptide
MTPASSPMGPFFGLPWQQEAIHDNIYTPRKYQVELLEAAL

SEQ ID NO: 5587 - protein, 40 aa, Artificial Sequence
  Description of Artificial Sequence: Synthetic polypeptide
PWQQEAIHDNIYTPRKYQVELLEAALDHNTIVCLNTGSGK

SEQ ID NO: 5588 - protein, 40 aa, Artificial Sequence
  Description of Artificial Sequence: Synthetic polypeptide
YQVELLEAALDHNTIVCLNTGSGKTFIAVLLTKELSYQIR

SEQ ID NO: 5589 - protein, 40 aa, Artificial Sequence
  Description of Artificial Sequence: Synthetic polypeptide
MDHNTIVCLNTGSGKTFIAVLLTKELSYQIRGDFSRNGKR

SEQ ID NO: 5590 - protein, 40 aa, Artificial Sequence
  Description of Artificial Sequence: Synthetic polypeptide
VGEYSNLEVNASWTKERWNQEFTKHQVLIMTCYVALNVLK

SEQ ID NO: 5591 - protein, 40 aa, Artificial Sequence
  Description of Artificial Sequence: Synthetic polypeptide
NLEVNASWTKERWNQEFTKHQVLIMTCYVALNVLKNGYLS

SEQ ID NO: 5592 - protein, 40 aa, Artificial Sequence
  Description of Artificial Sequence: Synthetic polypeptide
EVNASWTKERWNQEFTKHQVLIMTCYVALNVLKNGYLSLS

SEQ ID NO: 5593 - protein, 40 aa, Artificial Sequence
  Description of Artificial Sequence: Synthetic polypeptide
VNASWTKERWNQEFTKHQVLIMTCYVALNVLKNGYLSLSD

SEQ ID NO: 5594 - protein, 40 aa, Artificial Sequence
  Description of Artificial Sequence: Synthetic polypeptide
KERWNQEFTKHQVLIMTCYVALNVLKNGYLSLSDINLLVF

SEQ ID NO: 5595 - protein, 40 aa, Artificial Sequence
  Description of Artificial Sequence: Synthetic polypeptide
ERWNQEFTKHQVLIMTCYVALNVLKNGYLSLSDINLLVFD

SEQ ID NO: 5596 - protein, 40 aa, Artificial Sequence
  Description of Artificial Sequence: Synthetic polypeptide
WNQEFTKHQVLIMTCYVALNVLKNGYLSLSDINLLVFDEC

SEQ ID NO: 5597 - protein, 40 aa, Artificial Sequence
  Description of Artificial Sequence: Synthetic polypeptide
QEFTKHQVLIMTCYVALNVLKNGYLSLSDINLLVFDECHL

SEQ ID NO: 5598 - protein, 40 aa, Artificial Sequence
  Description of Artificial Sequence: Synthetic polypeptide
EFTKHQVLIMTCYVALNVLKNGYLSLSDINLLVFDECHLA

SEQ ID NO: 5599 - protein, 40 aa, Artificial Sequence
  Description of Artificial Sequence: Synthetic polypeptide
FTKHQVLIMTCYVALNVLKNGYLSLSDINLLVFDECHLAI

SEQ ID NO: 5600 - protein, 40 aa, Artificial Sequence
  Description of Artificial Sequence: Synthetic polypeptide
TKHQVLIMTCYVALNVLKNGYLSLSDINLLVFDECHLAIL

SEQ ID NO: 5601 - protein, 40 aa, Artificial Sequence
  Description of Artificial Sequence: Synthetic polypeptide
KHQVLIMTCYVALNVLKNGYLSLSDINLLVFDECHLAILD

SEQ ID NO: 5602 - protein, 40 aa, Artificial Sequence
  Description of Artificial Sequence: Synthetic polypeptide
HQVLIMTCYVALNVLKNGYLSLSDINLLVFDECHLAILDH

SEQ ID NO: 5603 - protein, 40 aa, Artificial Sequence
  Description of Artificial Sequence: Synthetic polypeptide
VLIMTCYVALNVLKNGYLSLSDINLLVFDECHLAILDHPY

SEQ ID NO: 5604 - protein, 40 aa, Artificial Sequence
  Description of Artificial Sequence: Synthetic polypeptide
LIMTCYVALNVLKNGYLSLSDINLLVFDECHLAILDHPYR

SEQ ID NO: 5605 - protein, 40 aa, Artificial Sequence
  Description of Artificial Sequence: Synthetic polypeptide
CYVALNVLKNGYLSLSDINLLVFDECHLAILDHPYREIMK

SEQ ID NO: 5606 - protein, 40 aa, Artificial Sequence
  Description of Artificial Sequence: Synthetic polypeptide
YVALNVLKNGYLSLSDINLLVFDECHLAILDHPYREIMKL

SEQ ID NO: 5607 - protein, 40 aa, Artificial Sequence
  Description of Artificial Sequence: Synthetic polypeptide
NVLKNGYLSLSDINLLVFDECHLAILDHPYREIMKLCENC

SEQ ID NO: 5608 - protein, 40 aa, Artificial Sequence
  Description of Artificial Sequence: Synthetic polypeptide
IMKLCENCPSCPRILGLTASILNGKCDPEELEEKIQKLEK

SEQ ID NO: 5609 - protein, 40 aa, Artificial Sequence
  Description of Artificial Sequence: Synthetic polypeptide
MKLCENCPSCPRILGLTASILNGKCDPEELEEKIQKLEKI

SEQ ID NO: 5610 - protein, 40 aa, Artificial Sequence
  Description of Artificial Sequence: Synthetic polypeptide
LCENCPSCPRILGLTASILNGKCDPEELEEKIQKLEKILK

SEQ ID NO: 5611 - protein, 40 aa, Artificial Sequence
  Description of Artificial Sequence: Synthetic polypeptide
PSCPRILGLTASILNGKCDPEELEEKIQKLEKILKSNAET

SEQ ID NO: 5612 - protein, 40 aa, Artificial Sequence
  Description of Artificial Sequence: Synthetic polypeptide
MGLTASILNGKCDPEELEEKIQKLEKILKSNAETATDLVV

SEQ ID NO: 5613 - protein, 40 aa, Artificial Sequence
  Description of Artificial Sequence: Synthetic polypeptide
ASILNGKCDPEELEEKIQKLEKILKSNAETATDLVVLDRY

SEQ ID NO: 5614 - protein, 40 aa, Artificial Sequence
  Description of Artificial Sequence: Synthetic polypeptide
SILNGKCDPEELEEKIQKLEKILKSNAETATDLVVLDRYT

SEQ ID NO: 5615 - protein, 40 aa, Artificial Sequence
  Description of Artificial Sequence: Synthetic polypeptide
ILNGKCDPEELEEKIQKLEKILKSNAETATDLVVLDRYTS

SEQ ID NO: 5616 - protein, 40 aa, Artificial Sequence
  Description of Artificial Sequence: Synthetic polypeptide
LNGKCDPEELEEKIQKLEKILKSNAETATDLVVLDRYTSQ

SEQ ID NO: 5617 - protein, 40 aa, Artificial Sequence
  Description of Artificial Sequence: Synthetic polypeptide
KCDPEELEEKIQKLEKILKSNAETATDLVVLDRYTSQPCE

SEQ ID NO: 5618 - protein, 40 aa, Artificial Sequence
  Description of Artificial Sequence: Synthetic polypeptide
LKSNAETATDLVVLDRYTSQPCEIVVDCGPFTDRSGLYER

SEQ ID NO: 5619 - protein, 40 aa, Artificial Sequence
  Description of Artificial Sequence: Synthetic polypeptide
ATDLVVLDRYTSQPCEIVVDCGPFTDRSGLYERLLMELEE

SEQ ID NO: 5620 - protein, 40 aa, Artificial Sequence
  Description of Artificial Sequence: Synthetic polypeptide
DCGPFTDRSGLYERLLMELEEALNFINDCNISVHSKERDS

SEQ ID NO: 5621 - protein, 40 aa, Artificial Sequence
  Description of Artificial Sequence: Synthetic polypeptide
FTDRSGLYERLLMELEEALNFINDCNISVHSKERDSTLIS

SEQ ID NO: 5622 - protein, 40 aa, Artificial Sequence
  Description of Artificial Sequence: Synthetic polypeptide
TDRSGLYERLLMELEEALNFINDCNISVHSKERDSTLISK

SEQ ID NO: 5623 - protein, 40 aa, Artificial Sequence
  Description of Artificial Sequence: Synthetic polypeptide
RSGLYERLLMELEEALNFINDCNISVHSKERDSTLISKQI

SEQ ID NO: 5624 - protein, 40 aa, Artificial Sequence
  Description of Artificial Sequence: Synthetic polypeptide
GLYERLLMELEEALNFINDCNISVHSKERDSTLISKQILS

SEQ ID NO: 5625 - protein, 40 aa, Artificial Sequence
  Description of Artificial Sequence: Synthetic polypeptide
LYERLLMELEEALNFINDCNISVHSKERDSTLISKQILSD

SEQ ID NO: 5626 - protein, 40 aa, Artificial Sequence
  Description of Artificial Sequence: Synthetic polypeptide
YERLLMELEEALNFINDCNISVHSKERDSTLISKQILSDC

SEQ ID NO: 5627 - protein, 40 aa, Artificial Sequence
  Description of Artificial Sequence: Synthetic polypeptide
ERLLMELEEALNFINDCNISVHSKERDSTLISKQILSDCR

SEQ ID NO: 5628 - protein, 40 aa, Artificial Sequence
  Description of Artificial Sequence: Synthetic polypeptide
MLMELEEALNFINDCNISVHSKERDSTLISKQILSDCRAV

SEQ ID NO: 5629 - protein, 40 aa, Artificial Sequence
  Description of Artificial Sequence: Synthetic polypeptide
MMELEEALNFINDCNISVHSKERDSTLISKQILSDCRAVL

SEQ ID NO: 5630 - protein, 40 aa, Artificial Sequence
  Description of Artificial Sequence: Synthetic polypeptide
MELEEALNFINDCNISVHSKERDSTLISKQILSDCRAVLV

SEQ ID NO: 5631 - protein, 40 aa, Artificial Sequence
  Description of Artificial Sequence: Synthetic polypeptide
EEALNFINDCNISVHSKERDSTLISKQILSDCRAVLVVLG

SEQ ID NO: 5632 - protein, 40 aa, Artificial Sequence
  Description of Artificial Sequence: Synthetic polypeptide
EALNFINDCNISVHSKERDSTLISKQILSDCRAVLVVLGP

SEQ ID NO: 5633 - protein, 40 aa, Artificial Sequence
  Description of Artificial Sequence: Synthetic polypeptide
FINDCNISVHSKERDSTLISKQILSDCRAVLVVLGPWCAD

SEQ ID NO: 5634 - protein, 40 aa, Artificial Sequence
  Description of Artificial Sequence: Synthetic polypeptide
INDCNISVHSKERDSTLISKQILSDCRAVLVVLGPWCADK

SEQ ID NO: 5635 - protein, 40 aa, Artificial Sequence
  Description of Artificial Sequence: Synthetic polypeptide
DCNISVHSKERDSTLISKQILSDCRAVLVVLGPWCADKVA

SEQ ID NO: 5636 - protein, 40 aa, Artificial Sequence
  Description of Artificial Sequence: Synthetic polypeptide
VHSKERDSTLISKQILSDCRAVLVVLGPWCADKVAGMMVR

SEQ ID NO: 5637 - protein, 40 aa, Artificial Sequence
  Description of Artificial Sequence: Synthetic polypeptide
SKERDSTLISKQILSDCRAVLVVLGPWCADKVAGMMVREL

SEQ ID NO: 5638 - protein, 40 aa, Artificial Sequence
  Description of Artificial Sequence: Synthetic polypeptide
KERDSTLISKQILSDCRAVLVVLGPWCADKVAGMMVRELQ

SEQ ID NO: 5639 - protein, 40 aa, Artificial Sequence
  Description of Artificial Sequence: Synthetic polypeptide
DSTLISKQILSDCRAVLVVLGPWCADKVAGMMVRELQKYI

SEQ ID NO: 5640 - protein, 40 aa, Artificial Sequence
  Description of Artificial Sequence: Synthetic polypeptide
TLISKQILSDCRAVLVVLGPWCADKVAGMMVRELQKYIKH

SEQ ID NO: 5641 - protein, 40 aa, Artificial Sequence
  Description of Artificial Sequence: Synthetic polypeptide
LISKQILSDCRAVLVVLGPWCADKVAGMMVRELQKYIKHE

SEQ ID NO: 5642 - protein, 40 aa, Artificial Sequence
  Description of Artificial Sequence: Synthetic polypeptide
ISKQILSDCRAVLVVLGPWCADKVAGMMVRELQKYIKHEQ

SEQ ID NO: 5643 - protein, 40 aa, Artificial Sequence
  Description of Artificial Sequence: Synthetic polypeptide
SKQILSDCRAVLVVLGPWCADKVAGMMVRELQKYIKHEQE

SEQ ID NO: 5644 - protein, 40 aa, Artificial Sequence
  Description of Artificial Sequence: Synthetic polypeptide
ILSDCRAVLVVLGPWCADKVAGMMVRELQKYIKHEQEELH

SEQ ID NO: 5645 - protein, 40 aa, Artificial Sequence
  Description of Artificial Sequence: Synthetic polypeptide
CRAVLVVLGPWCADKVAGMMVRELQKYIKHEQEELHRKFL

SEQ ID NO: 5646 - protein, 40 aa, Artificial Sequence
  Description of Artificial Sequence: Synthetic polypeptide
RAVLVVLGPWCADKVAGMMVRELQKYIKHEQEELHRKFLL

SEQ ID NO: 5647 - protein, 40 aa, Artificial Sequence
  Description of Artificial Sequence: Synthetic polypeptide
VLVVLGPWCADKVAGMMVRELQKYIKHEQEELHRKFLLFT

SEQ ID NO: 5648 - protein, 40 aa, Artificial Sequence
  Description of Artificial Sequence: Synthetic polypeptide
MVVLGPWCADKVAGMMVRELQKYIKHEQEELHRKFLLFTD

SEQ ID NO: 5649 - protein, 40 aa, Artificial Sequence
  Description of Artificial Sequence: Synthetic polypeptide
WCADKVAGMMVRELQKYIKHEQEELHRKFLLFTDTFLRKI

SEQ ID NO: 5650 - protein, 40 aa, Artificial Sequence
  Description of Artificial Sequence: Synthetic polypeptide
HRKFLLFTDTFLRKIHALCEEHFSPASLDLKFVTPKVIKL

SEQ ID NO: 5651 - protein, 40 aa, Artificial Sequence
  Description of Artificial Sequence: Synthetic polypeptide
RKFLLFTDTFLRKIHALCEEHFSPASLDLKFVTPKVIKLL

SEQ ID NO: 5652 - protein, 40 aa, Artificial Sequence
  Description of Artificial Sequence: Synthetic polypeptide
KFLLFTDTFLRKIHALCEEHFSPASLDLKFVTPKVIKLLE

SEQ ID NO: 5653 - protein, 40 aa, Artificial Sequence
  Description of Artificial Sequence: Synthetic polypeptide
FLLFTDTFLRKIHALCEEHFSPASLDLKFVTPKVIKLLEI

SEQ ID NO: 5654 - protein, 40 aa, Artificial Sequence
  Description of Artificial Sequence: Synthetic polypeptide
LLFTDTFLRKIHALCEEHFSPASLDLKFVTPKVIKLLEIL

SEQ ID NO: 5655 - protein, 40 aa, Artificial Sequence
  Description of Artificial Sequence: Synthetic polypeptide
FTDTFLRKIHALCEEHFSPASLDLKFVTPKVIKLLEILRK

SEQ ID NO: 5656 - protein, 40 aa, Artificial Sequence
  Description of Artificial Sequence: Synthetic polypeptide
KIHALCEEHFSPASLDLKFVTPKVIKLLEILRKYKPYERQ

SEQ ID NO: 5657 - protein, 40 aa, Artificial Sequence
  Description of Artificial Sequence: Synthetic polypeptide
IHALCEEHFSPASLDLKFVTPKVIKLLEILRKYKPYERQQ

SEQ ID NO: 5658 - protein, 40 aa, Artificial Sequence
  Description of Artificial Sequence: Synthetic polypeptide
CEEHFSPASLDLKFVTPKVIKLLEILRKYKPYERQQFESV

SEQ ID NO: 5659 - protein, 40 aa, Artificial Sequence
  Description of Artificial Sequence: Synthetic polypeptide
EEHFSPASLDLKFVTPKVIKLLEILRKYKPYERQQFESVE

SEQ ID NO: 5660 - protein, 40 aa, Artificial Sequence
  Description of Artificial Sequence: Synthetic polypeptide
FSPASLDLKFVTPKVIKLLEILRKYKPYERQQFESVEWYN

SEQ ID NO: 5661 - protein, 40 aa, Artificial Sequence
  Description of Artificial Sequence: Synthetic polypeptide
PASLDLKFVTPKVIKLLEILRKYKPYERQQFESVEWYNNR

SEQ ID NO: 5662 - protein, 40 aa, Artificial Sequence
  Description of Artificial Sequence: Synthetic polypeptide
ASLDLKFVTPKVIKLLEILRKYKPYERQQFESVEWYNNRN

SEQ ID NO: 5663 - protein, 40 aa, Artificial Sequence
  Description of Artificial Sequence: Synthetic polypeptide
LDLKFVTPKVIKLLEILRKYKPYERQQFESVEWYNNRNQD

SEQ ID NO: 5664 - protein, 40 aa, Artificial Sequence
  Description of Artificial Sequence: Synthetic polypeptide
KFVTPKVIKLLEILRKYKPYERQQFESVEWYNNRNQDNYV

SEQ ID NO: 5665 - protein, 40 aa, Artificial Sequence
  Description of Artificial Sequence: Synthetic polypeptide
TPKVIKLLEILRKYKPYERQQFESVEWYNNRNQDNYVSWS

SEQ ID NO: 5666 - protein, 40 aa, Artificial Sequence
  Description of Artificial Sequence: Synthetic polypeptide
PKVIKLLEILRKYKPYERQQFESVEWYNNRNQDNYVSWSD

SEQ ID NO: 5667 - protein, 40 aa, Artificial Sequence
  Description of Artificial Sequence: Synthetic polypeptide
ILRKYKPYERQQFESVEWYNNRNQDNYVSWSDSEDDDEDE

SEQ ID NO: 5668 - protein, 40 aa, Artificial Sequence
  Description of Artificial Sequence: Synthetic polypeptide
RKYKPYERQQFESVEWYNNRNQDNYVSWSDSEDDDEDEEI

SEQ ID NO: 5669 - protein, 40 aa, Artificial Sequence
  Description of Artificial Sequence: Synthetic polypeptide
KYKPYERQQFESVEWYNNRNQDNYVSWSDSEDDDEDEEIE

SEQ ID NO: 5670 - protein, 40 aa, Artificial Sequence
  Description of Artificial Sequence: Synthetic polypeptide
YKPYERQQFESVEWYNNRNQDNYVSWSDSEDDDEDEEIEE

SEQ ID NO: 5671 - protein, 40 aa, Artificial Sequence
  Description of Artificial Sequence: Synthetic polypeptide
QQFESVEWYNNRNQDNYVSWSDSEDDDEDEEIEEKEKPET

SEQ ID NO: 5672 - protein, 40 aa, Artificial Sequence
  Description of Artificial Sequence: Synthetic polypeptide
ESVEWYNNRNQDNYVSWSDSEDDDEDEEIEEKEKPETNFP

SEQ ID NO: 5673 - protein, 40 aa, Artificial Sequence
  Description of Artificial Sequence: Synthetic polypeptide
SVEWYNNRNQDNYVSWSDSEDDDEDEEIEEKEKPETNFPS

SEQ ID NO: 5674 - protein, 40 aa, Artificial Sequence
  Description of Artificial Sequence: Synthetic polypeptide
VEWYNNRNQDNYVSWSDSEDDDEDEEIEEKEKPETNFPSP

SEQ ID NO: 5675 - protein, 40 aa, Artificial Sequence
  Description of Artificial Sequence: Synthetic polypeptide
EWYNNRNQDNYVSWSDSEDDDEDEEIEEKEKPETNFPSPF

SEQ ID NO: 5676 - protein, 40 aa, Artificial Sequence
  Description of Artificial Sequence: Synthetic polypeptide
YNNRNQDNYVSWSDSEDDDEDEEIEEKEKPETNFPSPFTN

SEQ ID NO: 5677 - protein, 40 aa, Artificial Sequence
  Description of Artificial Sequence: Synthetic polypeptide
NNRNQDNYVSWSDSEDDDEDEEIEEKEKPETNFPSPFTNI

SEQ ID NO: 5678 - protein, 40 aa, Artificial Sequence
  Description of Artificial Sequence: Synthetic polypeptide
NRNQDNYVSWSDSEDDDEDEEIEEKEKPETNFPSPFTNIL

SEQ ID NO: 5679 - protein, 40 aa, Artificial Sequence
  Description of Artificial Sequence: Synthetic polypeptide
NQDNYVSWSDSEDDDEDEEIEEKEKPETNFPSPFTNILCG

SEQ ID NO: 5680 - protein, 40 aa, Artificial Sequence
  Description of Artificial Sequence: Synthetic polypeptide
WSDSEDDDEDEEIEEKEKPETNFPSPFTNILCGIIFVERR

SEQ ID NO: 5681 - protein, 40 aa, Artificial Sequence
  Description of Artificial Sequence: Synthetic polypeptide
DEDEEIEEKEKPETNFPSPFTNILCGIIFVERRYTAVVLN

SEQ ID NO: 5682 - protein, 40 aa, Artificial Sequence
  Description of Artificial Sequence: Synthetic polypeptide
EIEEKEKPETNFPSPFTNILCGIIFVERRYTAVVLNRLIK

SEQ ID NO: 5683 - protein, 40 aa, Artificial Sequence
  Description of Artificial Sequence: Synthetic polypeptide
EEKEKPETNFPSPFTNILCGIIFVERRYTAVVLNRLIKEA

SEQ ID NO: 5684 - protein, 40 aa, Artificial Sequence
  Description of Artificial Sequence: Synthetic polypeptide
KEKPETNFPSPFTNILCGIIFVERRYTAVVLNRLIKEAGK

SEQ ID NO: 5685 - protein, 40 aa, Artificial Sequence
  Description of Artificial Sequence: Synthetic polypeptide
TNFPSPFTNILCGIIFVERRYTAVVLNRLIKEAGKQDPEL

SEQ ID NO: 5686 - protein, 40 aa, Artificial Sequence
  Description of Artificial Sequence: Synthetic polypeptide
NFPSPFTNILCGIIFVERRYTAVVLNRLIKEAGKQDPELA

SEQ ID NO: 5687 - protein, 40 aa, Artificial Sequence
  Description of Artificial Sequence: Synthetic polypeptide
FPSPFTNILCGIIFVERRYTAVVLNRLIKEAGKQDPELAY

SEQ ID NO: 5688 - protein, 40 aa, Artificial Sequence
  Description of Artificial Sequence: Synthetic polypeptide
PSPFTNILCGIIFVERRYTAVVLNRLIKEAGKQDPELAYI

SEQ ID NO: 5689 - protein, 40 aa, Artificial Sequence
  Description of Artificial Sequence: Synthetic polypeptide
SPFTNILCGIIFVERRYTAVVLNRLIKEAGKQDPELAYIS

SEQ ID NO: 5690 - protein, 40 aa, Artificial Sequence
  Description of Artificial Sequence: Synthetic polypeptide
MCGIIFVERRYTAVVLNRLIKEAGKQDPELAYISSNFITG

SEQ ID NO: 5691 - protein, 40 aa, Artificial Sequence
  Description of Artificial Sequence: Synthetic polypeptide
CGIIFVERRYTAVVLNRLIKEAGKQDPELAYISSNFITGH

SEQ ID NO: 5692 - protein, 40 aa, Artificial Sequence
  Description of Artificial Sequence: Synthetic polypeptide
KQDPELAYISSNFITGHGIGKNQPRNKQMEAEFRKQEEVL

SEQ ID NO: 5693 - protein, 40 aa, Artificial Sequence
  Description of Artificial Sequence: Synthetic polypeptide
ITGHGIGKNQPRNKQMEAEFRKQEEVLRKFRAHETNLLIA

SEQ ID NO: 5694 - protein, 40 aa, Artificial Sequence
  Description of Artificial Sequence: Synthetic polypeptide
QMEAEFRKQEEVLRKFRAHETNLLIATSIVEEGVDIPKCN

SEQ ID NO: 5695 - protein, 40 aa, Artificial Sequence
  Description of Artificial Sequence: Synthetic polypeptide
AEFRKQEEVLRKFRAHETNLLIATSIVEEGVDIPKCNLVV

SEQ ID NO: 5696 - protein, 40 aa, Artificial Sequence
  Description of Artificial Sequence: Synthetic polypeptide
FRAHETNLLIATSIVEEGVDIPKCNLVVRFDLPTEYRSYV

SEQ ID NO: 5697 - protein, 40 aa, Artificial Sequence
  Description of Artificial Sequence: Synthetic polypeptide
MLIATSIVEEGVDIPKCNLVVRFDLPTEYRSYVQSKGRAR

SEQ ID NO: 5698 - protein, 40 aa, Artificial Sequence
  Description of Artificial Sequence: Synthetic polypeptide
IATSIVEEGVDIPKCNLVVRFDLPTEYRSYVQSKGRARAP

SEQ ID NO: 5699 - protein, 40 aa, Artificial Sequence
  Description of Artificial Sequence: Synthetic polypeptide
TSIVEEGVDIPKCNLVVRFDLPTEYRSYVQSKGRARAPIS

SEQ ID NO: 5700 - protein, 40 aa, Artificial Sequence
  Description of Artificial Sequence: Synthetic polypeptide
SIVEEGVDIPKCNLVVRFDLPTEYRSYVQSKGRARAPISN

SEQ ID NO: 5701 - protein, 40 aa, Artificial Sequence
  Description of Artificial Sequence: Synthetic polypeptide
IVEEGVDIPKCNLVVRFDLPTEYRSYVQSKGRARAPISNY

SEQ ID NO: 5702 - protein, 40 aa, Artificial Sequence
  Description of Artificial Sequence: Synthetic polypeptide
EEGVDIPKCNLVVRFDLPTEYRSYVQSKGRARAPISNYIM

SEQ ID NO: 5703 - protein, 40 aa, Artificial Sequence
  Description of Artificial Sequence: Synthetic polypeptide
GVDIPKCNLVVRFDLPTEYRSYVQSKGRARAPISNYIMLA

SEQ ID NO: 5704 - protein, 40 aa, Artificial Sequence
  Description of Artificial Sequence: Synthetic polypeptide
VDIPKCNLVVRFDLPTEYRSYVQSKGRARAPISNYIMLAD

SEQ ID NO: 5705 - protein, 40 aa, Artificial Sequence
  Description of Artificial Sequence: Synthetic polypeptide
PKCNLVVRFDLPTEYRSYVQSKGRARAPISNYIMLADTDK

SEQ ID NO: 5706 - protein, 40 aa, Artificial Sequence
  Description of Artificial Sequence: Synthetic polypeptide
CNLVVRFDLPTEYRSYVQSKGRARAPISNYIMLADTDKIK

SEQ ID NO: 5707 - protein, 40 aa, Artificial Sequence
  Description of Artificial Sequence: Synthetic polypeptide
ADTDKIKSFEEDLKTYKAIEKILRNKCSKSVDTGETDIDP

SEQ ID NO: 5708 - protein, 40 aa, Artificial Sequence
  Description of Artificial Sequence: Synthetic polypeptide
TDKIKSFEEDLKTYKAIEKILRNKCSKSVDTGETDIDPVM

SEQ ID NO: 5709 - protein, 40 aa, Artificial Sequence
  Description of Artificial Sequence: Synthetic polypeptide
DKIKSFEEDLKTYKAIEKILRNKCSKSVDTGETDIDPVMD

SEQ ID NO: 5710 - protein, 40 aa, Artificial Sequence
  Description of Artificial Sequence: Synthetic polypeptide
NRYCARLPSDPFTHLAPKCRTRELPDGTFYSTLYLPINSP

SEQ ID NO: 5711 - protein, 40 aa, Artificial Sequence
  Description of Artificial Sequence: Synthetic polypeptide
RLPSDPFTHLAPKCRTRELPDGTFYSTLYLPINSPLRASI

SEQ ID NO: 5712 - protein, 40 aa, Artificial Sequence
  Description of Artificial Sequence: Synthetic polypeptide
ELPDGTFYSTLYLPINSPLRASIVGPPMSCVRLAERVVAL

SEQ ID NO: 5713 - protein, 40 aa, Artificial Sequence
  Description of Artificial Sequence: Synthetic polypeptide
TFYSTLYLPINSPLRASIVGPPMSCVRLAERVVALICCEK

SEQ ID NO: 5714 - protein, 40 aa, Artificial Sequence
  Description of Artificial Sequence: Synthetic polypeptide
SIVGPPMSCVRLAERVVALICCEKLHKIGELDDHLMPVGK

SEQ ID NO: 5715 - protein, 40 aa, Artificial Sequence
  Description of Artificial Sequence: Synthetic polypeptide
ERVVALICCEKLHKIGELDDHLMPVGKETVKYEEELDLHD

SEQ ID NO: 5716 - protein, 40 aa, Artificial Sequence
  Description of Artificial Sequence: Synthetic polypeptide
KLHKIGELDDHLMPVGKETVKYEEELDLHDEEETSVPGRP

SEQ ID NO: 5717 - protein, 40 aa, Artificial Sequence
  Description of Artificial Sequence: Synthetic polypeptide
DHLMPVGKETVKYEEELDLHDEEETSVPGRPGSTKRRQCY

SEQ ID NO: 5718 - protein, 40 aa, Artificial Sequence
  Description of Artificial Sequence: Synthetic polypeptide
TVKYEEELDLHDEEETSVPGRPGSTKRRQCYPKAIPECLR

SEQ ID NO: 5719 - protein, 40 aa, Artificial Sequence
  Description of Artificial Sequence: Synthetic polypeptide
PECLRDSYPRPDQPCYLYVIGMVLTTPLPDELNFRRRKLY

SEQ ID NO: 5720 - protein, 40 aa, Artificial Sequence
  Description of Artificial Sequence: Synthetic polypeptide
TAKPIPQIPHFPVYTRSGEVTISIELKKSGFMLSLQMLEL

SEQ ID NO: 5721 - protein, 40 aa, Artificial Sequence
  Description of Artificial Sequence: Synthetic polypeptide
QIPHFPVYTRSGEVTISIELKKSGFMLSLQMLELITRLHQ

SEQ ID NO: 5722 - protein, 40 aa, Artificial Sequence
  Description of Artificial Sequence: Synthetic polypeptide
PHFPVYTRSGEVTISIELKKSGFMLSLQMLELITRLHQYI

SEQ ID NO: 5723 - protein, 40 aa, Artificial Sequence
  Description of Artificial Sequence: Synthetic polypeptide
HFPVYTRSGEVTISIELKKSGFMLSLQMLELITRLHQYIF

SEQ ID NO: 5724 - protein, 40 aa, Artificial Sequence
  Description of Artificial Sequence: Synthetic polypeptide
PVYTRSGEVTISIELKKSGFMLSLQMLELITRLHQYIFSH

SEQ ID NO: 5725 - protein, 40 aa, Artificial Sequence
  Description of Artificial Sequence: Synthetic polypeptide
YTRSGEVTISIELKKSGFMLSLQMLELITRLHQYIFSHIL

SEQ ID NO: 5726 - protein, 40 aa, Artificial Sequence
  Description of Artificial Sequence: Synthetic polypeptide
RSGEVTISIELKKSGFMLSLQMLELITRLHQYIFSHILRL

SEQ ID NO: 5727 - protein, 40 aa, Artificial Sequence
  Description of Artificial Sequence: Synthetic polypeptide
EVTISIELKKSGFMLSLQMLELITRLHQYIFSHILRLEKP

SEQ ID NO: 5728 - protein, 40 aa, Artificial Sequence
  Description of Artificial Sequence: Synthetic polypeptide
TISIELKKSGFMLSLQMLELITRLHQYIFSHILRLEKPAL

SEQ ID NO: 5729 - protein, 40 aa, Artificial Sequence
  Description of Artificial Sequence: Synthetic polypeptide
SGFMLSLQMLELITRLHQYIFSHILRLEKPALEFKPTDAD

SEQ ID NO: 5730 - protein, 40 aa, Artificial Sequence
  Description of Artificial Sequence: Synthetic polypeptide
MSLQMLELITRLHQYIFSHILRLEKPALEFKPTDADSAYC

SEQ ID NO: 5731 - protein, 40 aa, Artificial Sequence
  Description of Artificial Sequence: Synthetic polypeptide
LQMLELITRLHQYIFSHILRLEKPALEFKPTDADSAYCVL

SEQ ID NO: 5732 - protein, 40 aa, Artificial Sequence
  Description of Artificial Sequence: Synthetic polypeptide
QMLELITRLHQYIFSHILRLEKPALEFKPTDADSAYCVLP

SEQ ID NO: 5733 - protein, 40 aa, Artificial Sequence
  Description of Artificial Sequence: Synthetic polypeptide
ITRLHQYIFSHILRLEKPALEFKPTDADSAYCVLPLNVVN

SEQ ID NO: 5734 - protein, 40 aa, Artificial Sequence
  Description of Artificial Sequence: Synthetic polypeptide
QYIFSHILRLEKPALEFKPTDADSAYCVLPLNVVNDSSTL

SEQ ID NO: 5735 - protein, 40 aa, Artificial Sequence
  Description of Artificial Sequence: Synthetic polypeptide
YIFSHILRLEKPALEFKPTDADSAYCVLPLNVVNDSSTLD

SEQ ID NO: 5736 - protein, 40 aa, Artificial Sequence
  Description of Artificial Sequence: Synthetic polypeptide
LNVVNDSSTLDIDFKFMEDIEKSEARIGIPSTKYTKETPF

SEQ ID NO: 5737 - protein, 40 aa, Artificial Sequence
  Description of Artificial Sequence: Synthetic polypeptide
NVVNDSSTLDIDFKFMEDIEKSEARIGIPSTKYTKETPFV

SEQ ID NO: 5738 - protein, 40 aa, Artificial Sequence
  Description of Artificial Sequence: Synthetic polypeptide
VVNDSSTLDIDFKFMEDIEKSEARIGIPSTKYTKETPFVF

SEQ ID NO: 5739 - protein, 40 aa, Artificial Sequence
  Description of Artificial Sequence: Synthetic polypeptide
VNDSSTLDIDFKFMEDIEKSEARIGIPSTKYTKETPFVFK

SEQ ID NO: 5740 - protein, 40 aa, Artificial Sequence
  Description of Artificial Sequence: Synthetic polypeptide
NDSSTLDIDFKFMEDIEKSEARIGIPSTKYTKETPFVFKL

SEQ ID NO: 5741 - protein, 40 aa, Artificial Sequence
  Description of Artificial Sequence: Synthetic polypeptide
DSSTLDIDFKFMEDIEKSEARIGIPSTKYTKETPFVFKLE

SEQ ID NO: 5742 - protein, 40 aa, Artificial Sequence
  Description of Artificial Sequence: Synthetic polypeptide
SSTLDIDFKFMEDIEKSEARIGIPSTKYTKETPFVFKLED

SEQ ID NO: 5743 - protein, 40 aa, Artificial Sequence
  Description of Artificial Sequence: Synthetic polypeptide
TLDIDFKFMEDIEKSEARIGIPSTKYTKETPFVFKLEDYQ

SEQ ID NO: 5744 - protein, 40 aa, Artificial Sequence
  Description of Artificial Sequence: Synthetic polypeptide
MDIDFKFMEDIEKSEARIGIPSTKYTKETPFVFKLEDYQD

SEQ ID NO: 5745 - protein, 40 aa, Artificial Sequence
  Description of Artificial Sequence: Synthetic polypeptide
IDFKFMEDIEKSEARIGIPSTKYTKETPFVFKLEDYQDAV

SEQ ID NO: 5746 - protein, 40 aa, Artificial Sequence
  Description of Artificial Sequence: Synthetic polypeptide
FKFMEDIEKSEARIGIPSTKYTKETPFVFKLEDYQDAVII

SEQ ID NO: 5747 - protein, 40 aa, Artificial Sequence
  Description of Artificial Sequence: Synthetic polypeptide
FMEDIEKSEARIGIPSTKYTKETPFVFKLEDYQDAVIIPR

SEQ ID NO: 5748 - protein, 40 aa, Artificial Sequence
  Description of Artificial Sequence: Synthetic polypeptide
MEDIEKSEARIGIPSTKYTKETPFVFKLEDYQDAVIIPRY

SEQ ID NO: 5749 - protein, 40 aa, Artificial Sequence
  Description of Artificial Sequence: Synthetic polypeptide
EDIEKSEARIGIPSTKYTKETPFVFKLEDYQDAVIIPRYR

SEQ ID NO: 5750 - protein, 40 aa, Artificial Sequence
  Description of Artificial Sequence: Synthetic polypeptide
DIEKSEARIGIPSTKYTKETPFVFKLEDYQDAVIIPRYRN

SEQ ID NO: 5751 - protein, 40 aa, Artificial Sequence
  Description of Artificial Sequence: Synthetic polypeptide
IEKSEARIGIPSTKYTKETPFVFKLEDYQDAVIIPRYRNF

SEQ ID NO: 5752 - protein, 40 aa, Artificial Sequence
  Description of Artificial Sequence: Synthetic polypeptide
EKSEARIGIPSTKYTKETPFVFKLEDYQDAVIIPRYRNFD

SEQ ID NO: 5753 - protein, 40 aa, Artificial Sequence
  Description of Artificial Sequence: Synthetic polypeptide
KSEARIGIPSTKYTKETPFVFKLEDYQDAVIIPRYRNFDQ

SEQ ID NO: 5754 - protein, 40 aa, Artificial Sequence
  Description of Artificial Sequence: Synthetic polypeptide
FVFKLEDYQDAVIIPRYRNFDQPHRFYVADVYTDLTPLSK

SEQ ID NO: 5755 - protein, 40 aa, Artificial Sequence
  Description of Artificial Sequence: Synthetic polypeptide
PRYRNFDQPHRFYVADVYTDLTPLSKFPSPEYETFAEYYK

SEQ ID NO: 5756 - protein, 40 aa, Artificial Sequence
  Description of Artificial Sequence: Synthetic polypeptide
FDQPHRFYVADVYTDLTPLSKFPSPEYETFAEYYKTKYNL

SEQ ID NO: 5757 - protein, 40 aa, Artificial Sequence
  Description of Artificial Sequence: Synthetic polypeptide
RFYVADVYTDLTPLSKFPSPEYETFAEYYKTKYNLDLTNL

SEQ ID NO: 5758 - protein, 40 aa, Artificial Sequence
  Description of Artificial Sequence: Synthetic polypeptide
ADVYTDLTPLSKFPSPEYETFAEYYKTKYNLDLTNLNQPL

SEQ ID NO: 5759 - protein, 40 aa, Artificial Sequence
  Description of Artificial Sequence: Synthetic polypeptide
YETFAEYYKTKYNLDLTNLNQPLLDVDHTSSRLNLLTPRH

SEQ ID NO: 5760 - protein, 40 aa, Artificial Sequence
  Description of Artificial Sequence: Synthetic polypeptide
EYYKTKYNLDLTNLNQPLLDVDHTSSRLNLLTPRHLNQKG

SEQ ID NO: 5761 - protein, 40 aa, Artificial Sequence
  Description of Artificial Sequence: Synthetic polypeptide
YKTKYNLDLTNLNQPLLDVDHTSSRLNLLTPRHLNQKGKA

SEQ ID NO: 5762 - protein, 40 aa, Artificial Sequence
  Description of Artificial Sequence: Synthetic polypeptide
LNQPLLDVDHTSSRLNLLTPRHLNQKGKALPLSSAEKRKA

SEQ ID NO: 5763 - protein, 40 aa, Artificial Sequence
  Description of Artificial Sequence: Synthetic polypeptide
PLLDVDHTSSRLNLLTPRHLNQKGKALPLSSAEKRKAKWE

SEQ ID NO: 5764 - protein, 40 aa, Artificial Sequence
  Description of Artificial Sequence: Synthetic polypeptide
VDHTSSRLNLLTPRHLNQKGKALPLSSAEKRKAKWESLQN

SEQ ID NO: 5765 - protein, 40 aa, Artificial Sequence
  Description of Artificial Sequence: Synthetic polypeptide
DHTSSRLNLLTPRHLNQKGKALPLSSAEKRKAKWESLQNK

SEQ ID NO: 5766 - protein, 40 aa, Artificial Sequence
  Description of Artificial Sequence: Synthetic polypeptide
RLNLLTPRHLNQKGKALPLSSAEKRKAKWESLQNKQILVP

SEQ ID NO: 5767 - protein, 40 aa, Artificial Sequence
  Description of Artificial Sequence: Synthetic polypeptide
LLTPRHLNQKGKALPLSSAEKRKAKWESLQNKQILVPELC

SEQ ID NO: 5768 - protein, 40 aa, Artificial Sequence
  Description of Artificial Sequence: Synthetic polypeptide
CLLTAEELRAQTASDAGVGVRSLPADFRYPNLDFGWKKSI

SEQ ID NO: 5769 - protein, 40 aa, Artificial Sequence
  Description of Artificial Sequence: Synthetic polypeptide
LRAQTASDAGVGVRSLPADFRYPNLDFGWKKSIDSKSFIS

SEQ ID NO: 5770 - protein, 40 aa, Artificial Sequence
  Description of Artificial Sequence: Synthetic polypeptide
AQTASDAGVGVRSLPADFRYPNLDFGWKKSIDSKSFISIS

SEQ ID NO: 5771 - protein, 40 aa, Artificial Sequence
  Description of Artificial Sequence: Synthetic polypeptide
TASDAGVGVRSLPADFRYPNLDFGWKKSIDSKSFISISNS

SEQ ID NO: 5772 - protein, 40 aa, Artificial Sequence
  Description of Artificial Sequence: Synthetic polypeptide
SLPADFRYPNLDFGWKKSIDSKSFISISNSSSAENDNYCK

SEQ ID NO: 5773 - protein, 40 aa, Artificial Sequence
  Description of Artificial Sequence: Synthetic polypeptide
KSFISISNSSSAENDNYCKHSTIVPENAAHQGANRTSSLE

SEQ ID NO: 5774 - protein, 40 aa, Artificial Sequence
  Description of Artificial Sequence: Synthetic polypeptide
HSTIVPENAAHQGANRTSSLENHDQMSVNCRTLLSESPGK

SEQ ID NO: 5775 - protein, 40 aa, Artificial Sequence
  Description of Artificial Sequence: Synthetic polypeptide
ENAAHQGANRTSSLENHDQMSVNCRTLLSESPGKLHVEVS

SEQ ID NO: 5776 - protein, 40 aa, Artificial Sequence
  Description of Artificial Sequence: Synthetic polypeptide
AAHQGANRTSSLENHDQMSVNCRTLLSESPGKLHVEVSAD

SEQ ID NO: 5777 - protein, 40 aa, Artificial Sequence
  Description of Artificial Sequence: Synthetic polypeptide
HQGANRTSSLENHDQMSVNCRTLLSESPGKLHVEVSADLT

SEQ ID NO: 5778 - protein, 40 aa, Artificial Sequence
  Description of Artificial Sequence: Synthetic polypeptide
NRTSSLENHDQMSVNCRTLLSESPGKLHVEVSADLTAING

SEQ ID NO: 5779 - protein, 40 aa, Artificial Sequence
  Description of Artificial Sequence: Synthetic polypeptide
RTSSLENHDQMSVNCRTLLSESPGKLHVEVSADLTAINGL

SEQ ID NO: 5780 - protein, 40 aa, Artificial Sequence
  Description of Artificial Sequence: Synthetic polypeptide
SSLENHDQMSVNCRTLLSESPGKLHVEVSADLTAINGLSY

SEQ ID NO: 5781 - protein, 40 aa, Artificial Sequence
  Description of Artificial Sequence: Synthetic polypeptide
SLENHDQMSVNCRTLLSESPGKLHVEVSADLTAINGLSYN

SEQ ID NO: 5782 - protein, 40 aa, Artificial Sequence
  Description of Artificial Sequence: Synthetic polypeptide
LENHDQMSVNCRTLLSESPGKLHVEVSADLTAINGLSYNQ

SEQ ID NO: 5783 - protein, 40 aa, Artificial Sequence
  Description of Artificial Sequence: Synthetic polypeptide
ENHDQMSVNCRTLLSESPGKLHVEVSADLTAINGLSYNQN

SEQ ID NO: 5784 - protein, 40 aa, Artificial Sequence
  Description of Artificial Sequence: Synthetic polypeptide
HDQMSVNCRTLLSESPGKLHVEVSADLTAINGLSYNQNLA

SEQ ID NO: 5785 - protein, 40 aa, Artificial Sequence
  Description of Artificial Sequence: Synthetic polypeptide
QMSVNCRTLLSESPGKLHVEVSADLTAINGLSYNQNLANG

SEQ ID NO: 5786 - protein, 40 aa, Artificial Sequence
  Description of Artificial Sequence: Synthetic polypeptide
SVNCRTLLSESPGKLHVEVSADLTAINGLSYNQNLANGSY

SEQ ID NO: 5787 - protein, 40 aa, Artificial Sequence
  Description of Artificial Sequence: Synthetic polypeptide
VNCRTLLSESPGKLHVEVSADLTAINGLSYNQNLANGSYD

SEQ ID NO: 5788 - protein, 40 aa, Artificial Sequence
  Description of Artificial Sequence: Synthetic polypeptide
NCRTLLSESPGKLHVEVSADLTAINGLSYNQNLANGSYDL

SEQ ID NO: 5789 - protein, 40 aa, Artificial Sequence
  Description of Artificial Sequence: Synthetic polypeptide
CRTLLSESPGKLHVEVSADLTAINGLSYNQNLANGSYDLA

SEQ ID NO: 5790 - protein, 40 aa, Artificial Sequence
  Description of Artificial Sequence: Synthetic polypeptide
RTLLSESPGKLHVEVSADLTAINGLSYNQNLANGSYDLAN

SEQ ID NO: 5791 - protein, 40 aa, Artificial Sequence
  Description of Artificial Sequence: Synthetic polypeptide
PGKLHVEVSADLTAINGLSYNQNLANGSYDLANRDFCQGN

SEQ ID NO: 5792 - protein, 40 aa, Artificial Sequence
  Description of Artificial Sequence: Synthetic polypeptide
YDLANRDFCQGNQLNYYKQEIPVQPTTSYSIQNLYSYENQ

SEQ ID NO: 5793 - protein, 40 aa, Artificial Sequence
  Description of Artificial Sequence: Synthetic polypeptide
LANRDFCQGNQLNYYKQEIPVQPTTSYSIQNLYSYENQPQ

SEQ ID NO: 5794 - protein, 40 aa, Artificial Sequence
  Description of Artificial Sequence: Synthetic polypeptide
PTTSYSIQNLYSYENQPQPSDECTLLSNKYLDGNANKSTS

SEQ ID NO: 5795 - protein, 40 aa, Artificial Sequence
  Description of Artificial Sequence: Synthetic polypeptide
ECTLLSNKYLDGNANKSTSDGSPVMAVMPGTTDTIQVLKG

SEQ ID NO: 5796 - protein, 40 aa, Artificial Sequence
  Description of Artificial Sequence: Synthetic polypeptide
CTLLSNKYLDGNANKSTSDGSPVMAVMPGTTDTIQVLKGR

SEQ ID NO: 5797 - protein, 40 aa, Artificial Sequence
  Description of Artificial Sequence: Synthetic polypeptide
LLSNKYLDGNANKSTSDGSPVMAVMPGTTDTIQVLKGRMD

SEQ ID NO: 5798 - protein, 40 aa, Artificial Sequence
  Description of Artificial Sequence: Synthetic polypeptide
DGFNLERLEMLGDSFLKHAITTYLFCTYPDAHEGRLSYMR

SEQ ID NO: 5799 - protein, 40 aa, Artificial Sequence
  Description of Artificial Sequence: Synthetic polypeptide
LEMLGDSFLKHAITTYLFCTYPDAHEGRLSYMRSKKVSNC

SEQ ID NO: 5800 - protein, 40 aa, Artificial Sequence
  Description of Artificial Sequence: Synthetic polypeptide
MLGDSFLKHAITTYLFCTYPDAHEGRLSYMRSKKVSNCNL

SEQ ID NO: 5801 - protein, 40 aa, Artificial Sequence
  Description of Artificial Sequence: Synthetic polypeptide
LKHAITTYLFCTYPDAHEGRLSYMRSKKVSNCNLYRLGKK

SEQ ID NO: 5802 - protein, 40 aa, Artificial Sequence
  Description of Artificial Sequence: Synthetic polypeptide
KHAITTYLFCTYPDAHEGRLSYMRSKKVSNCNLYRLGKKK

SEQ ID NO: 5803 - protein, 40 aa, Artificial Sequence
  Description of Artificial Sequence: Synthetic polypeptide
HAITTYLFCTYPDAHEGRLSYMRSKKVSNCNLYRLGKKKG

SEQ ID NO: 5804 - protein, 40 aa, Artificial Sequence
  Description of Artificial Sequence: Synthetic polypeptide
ITTYLFCTYPDAHEGRLSYMRSKKVSNCNLYRLGKKKGLP

SEQ ID NO: 5805 - protein, 40 aa, Artificial Sequence
  Description of Artificial Sequence: Synthetic polypeptide
YLFCTYPDAHEGRLSYMRSKKVSNCNLYRLGKKKGLPSRM

SEQ ID NO: 5806 - protein, 40 aa, Artificial Sequence
  Description of Artificial Sequence: Synthetic polypeptide
LFCTYPDAHEGRLSYMRSKKVSNCNLYRLGKKKGLPSRMV

SEQ ID NO: 5807 - protein, 40 aa, Artificial Sequence
  Description of Artificial Sequence: Synthetic polypeptide
TYPDAHEGRLSYMRSKKVSNCNLYRLGKKKGLPSRMVVSI

SEQ ID NO: 5808 - protein, 40 aa, Artificial Sequence
  Description of Artificial Sequence: Synthetic polypeptide
YPDAHEGRLSYMRSKKVSNCNLYRLGKKKGLPSRMVVSIF

SEQ ID NO: 5809 - protein, 40 aa, Artificial Sequence
  Description of Artificial Sequence: Synthetic polypeptide
PDAHEGRLSYMRSKKVSNCNLYRLGKKKGLPSRMVVSIFD

SEQ ID NO: 5810 - protein, 40 aa, Artificial Sequence
  Description of Artificial Sequence: Synthetic polypeptide
AHEGRLSYMRSKKVSNCNLYRLGKKKGLPSRMVVSIFDPP

SEQ ID NO: 5811 - protein, 40 aa, Artificial Sequence
  Description of Artificial Sequence: Synthetic polypeptide
GRLSYMRSKKVSNCNLYRLGKKKGLPSRMVVSIFDPPVNW

SEQ ID NO: 5812 - protein, 40 aa, Artificial Sequence
  Description of Artificial Sequence: Synthetic polypeptide
RLSYMRSKKVSNCNLYRLGKKKGLPSRMVVSIFDPPVNWL

SEQ ID NO: 5813 - protein, 40 aa, Artificial Sequence
  Description of Artificial Sequence: Synthetic polypeptide
LSYMRSKKVSNCNLYRLGKKKGLPSRMVVSIFDPPVNWLP

SEQ ID NO: 5814 - protein, 40 aa, Artificial Sequence
  Description of Artificial Sequence: Synthetic polypeptide
KKVSNCNLYRLGKKKGLPSRMVVSIFDPPVNWLPPGYVVN

SEQ ID NO: 5815 - protein, 40 aa, Artificial Sequence
  Description of Artificial Sequence: Synthetic polypeptide
GLPSRMVVSIFDPPVNWLPPGYVVNQDKSNTDKWEKDEMT

SEQ ID NO: 5816 - protein, 40 aa, Artificial Sequence
  Description of Artificial Sequence: Synthetic polypeptide
DKSNTDKWEKDEMTKDCMLANGKLDEDYEEEDEEEESLMW

SEQ ID NO: 5817 - protein, 40 aa, Artificial Sequence
  Description of Artificial Sequence: Synthetic polypeptide
SLMWRAPKEEADYEDDFLEYDQEHIRFIDNMLMGSGAFVK

SEQ ID NO: 5818 - protein, 40 aa, Artificial Sequence
  Description of Artificial Sequence: Synthetic polypeptide
RAPKEEADYEDDFLEYDQEHIRFIDNMLMGSGAFVKKISL

SEQ ID NO: 5819 - protein, 40 aa, Artificial Sequence
  Description of Artificial Sequence: Synthetic polypeptide
KEEADYEDDFLEYDQEHIRFIDNMLMGSGAFVKKISLSPF

SEQ ID NO: 5820 - protein, 40 aa, Artificial Sequence
  Description of Artificial Sequence: Synthetic polypeptide
EADYEDDFLEYDQEHIRFIDNMLMGSGAFVKKISLSPFST

SEQ ID NO: 5821 - protein, 40 aa, Artificial Sequence
  Description of Artificial Sequence: Synthetic polypeptide
ADYEDDFLEYDQEHIRFIDNMLMGSGAFVKKISLSPFSTT

SEQ ID NO: 5822 - protein, 40 aa, Artificial Sequence
  Description of Artificial Sequence: Synthetic polypeptide
YEDDFLEYDQEHIRFIDNMLMGSGAFVKKISLSPFSTTDS

SEQ ID NO: 5823 - protein, 40 aa, Artificial Sequence
  Description of Artificial Sequence: Synthetic polypeptide
DDFLEYDQEHIRFIDNMLMGSGAFVKKISLSPFSTTDSAY

SEQ ID NO: 5824 - protein, 40 aa, Artificial Sequence
  Description of Artificial Sequence: Synthetic polypeptide
DFLEYDQEHIRFIDNMLMGSGAFVKKISLSPFSTTDSAYE

SEQ ID NO: 5825 - protein, 40 aa, Artificial Sequence
  Description of Artificial Sequence: Synthetic polypeptide
FLEYDQEHIRFIDNMLMGSGAFVKKISLSPFSTTDSAYEW

SEQ ID NO: 5826 - protein, 40 aa, Artificial Sequence
  Description of Artificial Sequence: Synthetic polypeptide
EYDQEHIRFIDNMLMGSGAFVKKISLSPFSTTDSAYEWKM

SEQ ID NO: 5827 - protein, 40 aa, Artificial Sequence
  Description of Artificial Sequence: Synthetic polypeptide
YDQEHIRFIDNMLMGSGAFVKKISLSPFSTTDSAYEWKMP

SEQ ID NO: 5828 - protein, 40 aa, Artificial Sequence
  Description of Artificial Sequence: Synthetic polypeptide
QEHIRFIDNMLMGSGAFVKKISLSPFSTTDSAYEWKMPKK

SEQ ID NO: 5829 - protein, 40 aa, Artificial Sequence
  Description of Artificial Sequence: Synthetic polypeptide
EHIRFIDNMLMGSGAFVKKISLSPFSTTDSAYEWKMPKKS

SEQ ID NO: 5830 - protein, 40 aa, Artificial Sequence
  Description of Artificial Sequence: Synthetic polypeptide
HIRFIDNMLMGSGAFVKKISLSPFSTTDSAYEWKMPKKSS

SEQ ID NO: 5831 - protein, 40 aa, Artificial Sequence
  Description of Artificial Sequence: Synthetic polypeptide
FIDNMLMGSGAFVKKISLSPFSTTDSAYEWKMPKKSSLGS

SEQ ID NO: 5832 - protein, 40 aa, Artificial Sequence
  Description of Artificial Sequence: Synthetic polypeptide
IDNMLMGSGAFVKKISLSPFSTTDSAYEWKMPKKSSLGSM

SEQ ID NO: 5833 - protein, 40 aa, Artificial Sequence
  Description of Artificial Sequence: Synthetic polypeptide
DNMLMGSGAFVKKISLSPFSTTDSAYEWKMPKKSSLGSMP

SEQ ID NO: 5834 - protein, 40 aa, Artificial Sequence
  Description of Artificial Sequence: Synthetic polypeptide
NMLMGSGAFVKKISLSPFSTTDSAYEWKMPKKSSLGSMPF

SEQ ID NO: 5835 - protein, 40 aa, Artificial Sequence
  Description of Artificial Sequence: Synthetic polypeptide
LMGSGAFVKKISLSPFSTTDSAYEWKMPKKSSLGSMPFSS

SEQ ID NO: 5836 - protein, 40 aa, Artificial Sequence
  Description of Artificial Sequence: Synthetic polypeptide
GSGAFVKKISLSPFSTTDSAYEWKMPKKSSLGSMPFSSDF

SEQ ID NO: 5837 - protein, 40 aa, Artificial Sequence
  Description of Artificial Sequence: Synthetic polypeptide
AFVKKISLSPFSTTDSAYEWKMPKKSSLGSMPFSSDFEDF

SEQ ID NO: 5838 - protein, 40 aa, Artificial Sequence
  Description of Artificial Sequence: Synthetic polypeptide
VKKISLSPFSTTDSAYEWKMPKKSSLGSMPFSSDFEDFDY

SEQ ID NO: 5839 - protein, 40 aa, Artificial Sequence
  Description of Artificial Sequence: Synthetic polypeptide
CGVDTGKQSISYDLHTEQCIADKSIADCVEALLGCYLTSC

SEQ ID NO: 5840 - protein, 40 aa, Artificial Sequence
  Description of Artificial Sequence: Synthetic polypeptide
SYDLHTEQCIADKSIADCVEALLGCYLTSCGERAAQLFLC

SEQ ID NO: 5841 - protein, 40 aa, Artificial Sequence
  Description of Artificial Sequence: Synthetic polypeptide
KSIADCVEALLGCYLTSCGERAAQLFLCSLGLKVLPVIKR

SEQ ID NO: 5842 - protein, 40 aa, Artificial Sequence
  Description of Artificial Sequence: Synthetic polypeptide
CVEALLGCYLTSCGERAAQLFLCSLGLKVLPVIKRTDREK

SEQ ID NO: 5843 - protein, 40 aa, Artificial Sequence
  Description of Artificial Sequence: Synthetic polypeptide
GCYLTSCGERAAQLFLCSLGLKVLPVIKRTDREKALCPTR

SEQ ID NO: 5844 - protein, 40 aa, Artificial Sequence
  Description of Artificial Sequence: Synthetic polypeptide
VLKDSEYGCLKIPPRCMFDHPDADKTLNHLISGFENFEKK

SEQ ID NO: 5845 - protein, 40 aa, Artificial Sequence
  Description of Artificial Sequence: Synthetic polypeptide
MKIPPRCMFDHPDADKTLNHLISGFENFEKKINYRFKNKA

SEQ ID NO: 5846 - protein, 40 aa, Artificial Sequence
  Description of Artificial Sequence: Synthetic polypeptide
KIPPRCMFDHPDADKTLNHLISGFENFEKKINYRFKNKAY

SEQ ID NO: 5847 - protein, 40 aa, Artificial Sequence
  Description of Artificial Sequence: Synthetic polypeptide
PPRCMFDHPDADKTLNHLISGFENFEKKINYRFKNKAYLL

SEQ ID NO: 5848 - protein, 40 aa, Artificial Sequence
  Description of Artificial Sequence: Synthetic polypeptide
MFDHPDADKTLNHLISGFENFEKKINYRFKNKAYLLQAFT

SEQ ID NO: 5849 - protein, 40 aa, Artificial Sequence
  Description of Artificial Sequence: Synthetic polypeptide
PDADKTLNHLISGFENFEKKINYRFKNKAYLLQAFTHASY

SEQ ID NO: 5850 - protein, 40 aa, Artificial Sequence
  Description of Artificial Sequence: Synthetic polypeptide
DKTLNHLISGFENFEKKINYRFKNKAYLLQAFTHASYHYN

SEQ ID NO: 5851 - protein, 40 aa, Artificial Sequence
  Description of Artificial Sequence: Synthetic polypeptide
GFENFEKKINYRFKNKAYLLQAFTHASYHYNTITDCYQRL

SEQ ID NO: 5852 - protein, 40 aa, Artificial Sequence
  Description of Artificial Sequence: Synthetic polypeptide
YLLQAFTHASYHYNTITDCYQRLEFLGDAILDYLITKHLY

SEQ ID NO: 5853 - protein, 40 aa, Artificial Sequence
  Description of Artificial Sequence: Synthetic polypeptide
YLITKHLYEDPRQHSPGVLTDLRSALVNNTIFASLAVKYD

SEQ ID NO: 5854 - protein, 40 aa, Artificial Sequence
  Description of Artificial Sequence: Synthetic polypeptide
SPGVLTDLRSALVNNTIFASLAVKYDYHKYFKAVSPELFH

SEQ ID NO: 5855 - protein, 40 aa, Artificial Sequence
  Description of Artificial Sequence: Synthetic polypeptide
AMGDIFESLAGAIYMDSGMSLETVWQVYYPMMRPLIEKFS

SEQ ID NO: 5856 - protein, 40 aa, Artificial Sequence
  Description of Artificial Sequence: Synthetic polypeptide
MGDIFESLAGAIYMDSGMSLETVWQVYYPMMRPLIEKFSA

SEQ ID NO: 5857 - protein, 40 aa, Artificial Sequence
  Description of Artificial Sequence: Synthetic polypeptide
GDIFESLAGAIYMDSGMSLETVWQVYYPMMRPLIEKFSAN

SEQ ID NO: 5858 - protein, 40 aa, Artificial Sequence
  Description of Artificial Sequence: Synthetic polypeptide
FESLAGAIYMDSGMSLETVWQVYYPMMRPLIEKFSANVPR

SEQ ID NO: 5859 - protein, 40 aa, Artificial Sequence
  Description of Artificial Sequence: Synthetic polypeptide
PVRELLEMEPETAKFSPAERTYDGKVRVTVEVVGKGKFKG

SEQ ID NO: 5860 - protein, 40 aa, Artificial Sequence
  Description of Artificial Sequence: Synthetic polypeptide
MEPETAKFSPAERTYDGKVRVTVEVVGKGKFKGVGRSYRI

SEQ ID NO: 5861 - protein, 40 aa, Artificial Sequence
  Description of Artificial Sequence: Synthetic polypeptide
TAKFSPAERTYDGKVRVTVEVVGKGKFKGVGRSYRIAKSA

SEQ ID NO: 5862 - protein, 40 aa, Artificial Sequence
  Description of Artificial Sequence: Synthetic polypeptide
FSPAERTYDGKVRVTVEVVGKGKFKGVGRSYRIAKSAAAR

SEQ ID NO: 5863 - protein, 40 aa, Artificial Sequence
  Description of Artificial Sequence: Synthetic polypeptide
PAERTYDGKVRVTVEVVGKGKFKGVGRSYRIAKSAAARRA

SEQ ID NO: 5864 - protein, 40 aa, Artificial Sequence
  Description of Artificial Sequence: Synthetic polypeptide
TAGAALLALLAALCPASRALEEKKVCQGTSNKLTQLGTFE

SEQ ID NO: 5865 - protein, 40 aa, Artificial Sequence
  Description of Artificial Sequence: Synthetic polypeptide
MGTFEDHFLSLQRMFNNCEVVLGNLEITYVQRNYDLSFLK

SEQ ID NO: 5866 - protein, 40 aa, Artificial Sequence
  Description of Artificial Sequence: Synthetic polypeptide
DHFLSLQRMFNNCEVVLGNLEITYVQRNYDLSFLKTIQEV

SEQ ID NO: 5867 - protein, 40 aa, Artificial Sequence
  Description of Artificial Sequence: Synthetic polypeptide
LQRMFNNCEVVLGNLEITYVQRNYDLSFLKTIQEVAGYVL

SEQ ID NO: 5868 - protein, 40 aa, Artificial Sequence
  Description of Artificial Sequence: Synthetic polypeptide
ALNTVERIPLENLQIIRGNMYYENSYALAVLSNYDANKTG

SEQ ID NO: 5869 - protein, 40 aa, Artificial Sequence
  Description of Artificial Sequence: Synthetic polypeptide
MENLQIIRGNMYYENSYALAVLSNYDANKTGLKELPMRNL

SEQ ID NO: 5870 - protein, 40 aa, Artificial Sequence
  Description of Artificial Sequence: Synthetic polypeptide
ENLQIIRGNMYYENSYALAVLSNYDANKTGLKELPMRNLQ

SEQ ID NO: 5871 - protein, 40 aa, Artificial Sequence
  Description of Artificial Sequence: Synthetic polypeptide
VKKCPRNYVVTDHGSCVRACGADSYEMEEDGVRKCKKCEG

SEQ ID NO: 5872 - protein, 40 aa, Artificial Sequence
  Description of Artificial Sequence: Synthetic polypeptide
ACGADSYEMEEDGVRKCKKCEGPCRKVCNGIGIGEFKDSL

SEQ ID NO: 5873 - protein, 40 aa, Artificial Sequence
  Description of Artificial Sequence: Synthetic polypeptide
SYEMEEDGVRKCKKCEGPCRKVCNGIGIGEFKDSLSINAT

SEQ ID NO: 5874 - protein, 40 aa, Artificial Sequence
  Description of Artificial Sequence: Synthetic polypeptide
YEMEEDGVRKCKKCEGPCRKVCNGIGIGEFKDSLSINATN

SEQ ID NO: 5875 - protein, 40 aa, Artificial Sequence
  Description of Artificial Sequence: Synthetic polypeptide
EDGVRKCKKCEGPCRKVCNGIGIGEFKDSLSINATNIKHF

SEQ ID NO: 5876 - protein, 40 aa, Artificial Sequence
  Description of Artificial Sequence: Synthetic polypeptide
EGPCRKVCNGIGIGEFKDSLSINATNIKHFKNCTSISGDL

SEQ ID NO: 5877 - protein, 40 aa, Artificial Sequence
  Description of Artificial Sequence: Synthetic polypeptide
KNCTSISGDLHILPVAFRGDSFTHTPPLDPQELDILKTVK

SEQ ID NO: 5878 - protein, 40 aa, Artificial Sequence
  Description of Artificial Sequence: Synthetic polypeptide
SISGDLHILPVAFRGDSFTHTPPLDPQELDILKTVKEITG

SEQ ID NO: 5879 - protein, 40 aa, Artificial Sequence
  Description of Artificial Sequence: Synthetic polypeptide
SGDLHILPVAFRGDSFTHTPPLDPQELDILKTVKEITGFL

SEQ ID NO: 5880 - protein, 40 aa, Artificial Sequence
  Description of Artificial Sequence: Synthetic polypeptide
DLHILPVAFRGDSFTHTPPLDPQELDILKTVKEITGFLLI

SEQ ID NO: 5881 - protein, 40 aa, Artificial Sequence
  Description of Artificial Sequence: Synthetic polypeptide
ILPVAFRGDSFTHTPPLDPQELDILKTVKEITGFLLIQAW

SEQ ID NO: 5882 - protein, 40 aa, Artificial Sequence
  Description of Artificial Sequence: Synthetic polypeptide
MPVAFRGDSFTHTPPLDPQELDILKTVKEITGFLLIQAWP

SEQ ID NO: 5883 - protein, 40 aa, Artificial Sequence
  Description of Artificial Sequence: Synthetic polypeptide
TPPLDPQELDILKTVKEITGFLLIQAWPENRTDLHAFENL

SEQ ID NO: 5884 - protein, 40 aa, Artificial Sequence
  Description of Artificial Sequence: Synthetic polypeptide
QELDILKTVKEITGFLLIQAWPENRTDLHAFENLEIIRGR

SEQ ID NO: 5885 - protein, 40 aa, Artificial Sequence
  Description of Artificial Sequence: Synthetic polypeptide
DILKTVKEITGFLLIQAWPENRTDLHAFENLEIIRGRTKQ

SEQ ID NO: 5886 - protein, 40 aa, Artificial Sequence
  Description of Artificial Sequence: Synthetic polypeptide
VKEITGFLLIQAWPENRTDLHAFENLEIIRGRTKQHGQFS

SEQ ID NO: 5887 - protein, 40 aa, Artificial Sequence
  Description of Artificial Sequence: Synthetic polypeptide
LEIIRGRTKQHGQFSLAVVSLNITSLGLRSLKEISDGDVI

SEQ ID NO: 5888 - protein, 40 aa, Artificial Sequence
  Description of Artificial Sequence: Synthetic polypeptide
RGRTKQHGQFSLAVVSLNITSLGLRSLKEISDGDVIISGN

SEQ ID NO: 5889 - protein, 40 aa, Artificial Sequence
  Description of Artificial Sequence: Synthetic polypeptide
HGQFSLAVVSLNITSLGLRSLKEISDGDVIISGNKNLCYA

SEQ ID NO: 5890 - protein, 40 aa, Artificial Sequence
  Description of Artificial Sequence: Synthetic polypeptide
FSLAVVSLNITSLGLRSLKEISDGDVIISGNKNLCYANTI

SEQ ID NO: 5891 - protein, 40 aa, Artificial Sequence
  Description of Artificial Sequence: Synthetic polypeptide
VVSLNITSLGLRSLKEISDGDVIISGNKNLCYANTINWKK

SEQ ID NO: 5892 - protein, 40 aa, Artificial Sequence
  Description of Artificial Sequence: Synthetic polypeptide
NITSLGLRSLKEISDGDVIISGNKNLCYANTINWKKLFGT

SEQ ID NO: 5893 - protein, 40 aa, Artificial Sequence
  Description of Artificial Sequence: Synthetic polypeptide
ITSLGLRSLKEISDGDVIISGNKNLCYANTINWKKLFGTS

SEQ ID NO: 5894 - protein, 40 aa, Artificial Sequence
  Description of Artificial Sequence: Synthetic polypeptide
TSLGLRSLKEISDGDVIISGNKNLCYANTINWKKLFGTSG

SEQ ID NO: 5895 - protein, 40 aa, Artificial Sequence
  Description of Artificial Sequence: Synthetic polypeptide
SLGLRSLKEISDGDVIISGNKNLCYANTINWKKLFGTSGQ

SEQ ID NO: 5896 - protein, 40 aa, Artificial Sequence
  Description of Artificial Sequence: Synthetic polypeptide
GLRSLKEISDGDVIISGNKNLCYANTINWKKLFGTSGQKT

SEQ ID NO: 5897 - protein, 40 aa, Artificial Sequence
  Description of Artificial Sequence: Synthetic polypeptide
RSLKEISDGDVIISGNKNLCYANTINWKKLFGTSGQKTKI

SEQ ID NO: 5898 - protein, 40 aa, Artificial Sequence
  Description of Artificial Sequence: Synthetic polypeptide
MCYANTINWKKLFGTSGQKTKIISNRGENSCKATGQVCHA

SEQ ID NO: 5899 - protein, 40 aa, Artificial Sequence
  Description of Artificial Sequence: Synthetic polypeptide
CYANTINWKKLFGTSGQKTKIISNRGENSCKATGQVCHAL

SEQ ID NO: 5900 - protein, 40 aa, Artificial Sequence
  Description of Artificial Sequence: Synthetic polypeptide
TINWKKLFGTSGQKTKIISNRGENSCKATGQVCHALCSPE

SEQ ID NO: 5901 - protein, 40 aa, Artificial Sequence
  Description of Artificial Sequence: Synthetic polypeptide
INWKKLFGTSGQKTKIISNRGENSCKATGQVCHALCSPEG

SEQ ID NO: 5902 - protein, 40 aa, Artificial Sequence
  Description of Artificial Sequence: Synthetic polypeptide
WKKLFGTSGQKTKIISNRGENSCKATGQVCHALCSPEGCW

SEQ ID NO: 5903 - protein, 40 aa, Artificial Sequence
  Description of Artificial Sequence: Synthetic polypeptide
GTSGQKTKIISNRGENSCKATGQVCHALCSPEGCWGPEPR

SEQ ID NO: 5904 - protein, 40 aa, Artificial Sequence
  Description of Artificial Sequence: Synthetic polypeptide
RGENSCKATGQVCHALCSPEGCWGPEPRDCVSCRNVSRGR

SEQ ID NO: 5905 - protein, 40 aa, Artificial Sequence
  Description of Artificial Sequence: Synthetic polypeptide
LFMRRRHIVRKRTLRRLLQERELVEPLTPSGEAPNQALLR

SEQ ID NO: 5906 - protein, 40 aa, Artificial Sequence
  Description of Artificial Sequence: Synthetic polypeptide
MRRLLQERELVEPLTPSGEAPNQALLRILKETEFKKIKVL

SEQ ID NO: 5907 - protein, 40 aa, Artificial Sequence
  Description of Artificial Sequence: Synthetic polypeptide
RRLLQERELVEPLTPSGEAPNQALLRILKETEFKKIKVLG

SEQ ID NO: 5908 - protein, 40 aa, Artificial Sequence
  Description of Artificial Sequence: Synthetic polypeptide
QERELVEPLTPSGEAPNQALLRILKETEFKKIKVLGSGAF

SEQ ID NO: 5909 - protein, 40 aa, Artificial Sequence
  Description of Artificial Sequence: Synthetic polypeptide
LVEPLTPSGEAPNQALLRILKETEFKKIKVLGSGAFGTVY

SEQ ID NO: 5910 - protein, 40 aa, Artificial Sequence
  Description of Artificial Sequence: Synthetic polypeptide
PLTPSGEAPNQALLRILKETEFKKIKVLGSGAFGTVYKGL

SEQ ID NO: 5911 - protein, 40 aa, Artificial Sequence
  Description of Artificial Sequence: Synthetic polypeptide
SGEAPNQALLRILKETEFKKIKVLGSGAFGTVYKGLWIPE

SEQ ID NO: 5912 - protein, 40 aa, Artificial Sequence
  Description of Artificial Sequence: Synthetic polypeptide
ALLRILKETEFKKIKVLGSGAFGTVYKGLWIPEGEKVKIP

SEQ ID NO: 5913 - protein, 40 aa, Artificial Sequence
  Description of Artificial Sequence: Synthetic polypeptide
LLRILKETEFKKIKVLGSGAFGTVYKGLWIPEGEKVKIPV

SEQ ID NO: 5914 - protein, 40 aa, Artificial Sequence
  Description of Artificial Sequence: Synthetic polypeptide
MRILKETEFKKIKVLGSGAFGTVYKGLWIPEGEKVKIPVA

SEQ ID NO: 5915 - protein, 40 aa, Artificial Sequence
  Description of Artificial Sequence: Synthetic polypeptide
ILKETEFKKIKVLGSGAFGTVYKGLWIPEGEKVKIPVAIK

SEQ ID NO: 5916 - protein, 40 aa, Artificial Sequence
  Description of Artificial Sequence: Synthetic polypeptide
TEFKKIKVLGSGAFGTVYKGLWIPEGEKVKIPVAIKELRE

SEQ ID NO: 5917 - protein, 40 aa, Artificial Sequence
  Description of Artificial Sequence: Synthetic polypeptide
FKKIKVLGSGAFGTVYKGLWIPEGEKVKIPVAIKELREAT

SEQ ID NO: 5918 - protein, 40 aa, Artificial Sequence
  Description of Artificial Sequence: Synthetic polypeptide
KKIKVLGSGAFGTVYKGLWIPEGEKVKIPVAIKELREATS

SEQ ID NO: 5919 - protein, 40 aa, Artificial Sequence
  Description of Artificial Sequence: Synthetic polypeptide
KIKVLGSGAFGTVYKGLWIPEGEKVKIPVAIKELREATSP

SEQ ID NO: 5920 - protein, 40 aa, Artificial Sequence
  Description of Artificial Sequence: Synthetic polypeptide
IKVLGSGAFGTVYKGLWIPEGEKVKIPVAIKELREATSPK

SEQ ID NO: 5921 - protein, 40 aa, Artificial Sequence
  Description of Artificial Sequence: Synthetic polypeptide
GAFGTVYKGLWIPEGEKVKIPVAIKELREATSPKANKEIL

SEQ ID NO: 5922 - protein, 40 aa, Artificial Sequence
  Description of Artificial Sequence: Synthetic polypeptide
AFGTVYKGLWIPEGEKVKIPVAIKELREATSPKANKEILD

SEQ ID NO: 5923 - protein, 40 aa, Artificial Sequence
  Description of Artificial Sequence: Synthetic polypeptide
TVYKGLWIPEGEKVKIPVAIKELREATSPKANKEILDEAY

SEQ ID NO: 5924 - protein, 40 aa, Artificial Sequence
  Description of Artificial Sequence: Synthetic polypeptide
VYKGLWIPEGEKVKIPVAIKELREATSPKANKEILDEAYV

SEQ ID NO: 5925 - protein, 40 aa, Artificial Sequence
  Description of Artificial Sequence: Synthetic polypeptide
YKGLWIPEGEKVKIPVAIKELREATSPKANKEILDEAYVM

SEQ ID NO: 5926 - protein, 40 aa, Artificial Sequence
  Description of Artificial Sequence: Synthetic polypeptide
GLWIPEGEKVKIPVAIKELREATSPKANKEILDEAYVMAS

SEQ ID NO: 5927 - protein, 40 aa, Artificial Sequence
  Description of Artificial Sequence: Synthetic polypeptide
SSILEKGERLPQPPICTIDVYMIMVKCWMIDADSRPKFRE

SEQ ID NO: 5928 - protein, 40 aa, Artificial Sequence
  Description of Artificial Sequence: Synthetic polypeptide
ERLPQPPICTIDVYMIMVKCWMIDADSRPKFRELIIEFSK

SEQ ID NO: 5929 - protein, 40 aa, Artificial Sequence
  Description of Artificial Sequence: Synthetic polypeptide
NGLQSCPIKEDSFLQRYSSDPTGALTEDSIDDTFLPVPEY

SEQ ID NO: 5930 - protein, 40 aa, Artificial Sequence
  Description of Artificial Sequence: Synthetic polypeptide
KEDSFLQRYSSDPTGALTEDSIDDTFLPVPEYINQSVPKR

SEQ ID NO: 5931 - protein, 40 aa, Artificial Sequence
  Description of Artificial Sequence: Synthetic polypeptide
EDSFLQRYSSDPTGALTEDSIDDTFLPVPEYINQSVPKRP

SEQ ID NO: 5932 - protein, 40 aa, Artificial Sequence
  Description of Artificial Sequence: Synthetic polypeptide
FLQRYSSDPTGALTEDSIDDTFLPVPEYINQSVPKRPAGS

SEQ ID NO: 5933 - protein, 40 aa, Artificial Sequence
  Description of Artificial Sequence: Synthetic polypeptide
SDPTGALTEDSIDDTFLPVPEYINQSVPKRPAGSVQNPVY

SEQ ID NO: 5934 - protein, 40 aa, Artificial Sequence
  Description of Artificial Sequence: Synthetic polypeptide
PTGALTEDSIDDTFLPVPEYINQSVPKRPAGSVQNPVYHN

SEQ ID NO: 5935 - protein, 40 aa, Artificial Sequence
  Description of Artificial Sequence: Synthetic polypeptide
NLELTYLPTNASLSFLQDIQEVQGYVLIAHNQVRQVPLQR

SEQ ID NO: 5936 - protein, 40 aa, Artificial Sequence
  Description of Artificial Sequence: Synthetic polypeptide
TNASLSFLQDIQEVQGYVLIAHNQVRQVPLQRLRIVRGTQ

SEQ ID NO: 5937 - protein, 40 aa, Artificial Sequence
  Description of Artificial Sequence: Synthetic polypeptide
RGTQLFEDNYALAVLDNGDPLNNTTPVTGASPGGLRELQL

SEQ ID NO: 5938 - protein, 40 aa, Artificial Sequence
  Description of Artificial Sequence: Synthetic polypeptide
GTQLFEDNYALAVLDNGDPLNNTTPVTGASPGGLRELQLR

SEQ ID NO: 5939 - protein, 40 aa, Artificial Sequence
  Description of Artificial Sequence: Synthetic polypeptide
LFEDNYALAVLDNGDPLNNTTPVTGASPGGLRELQLRSLT

SEQ ID NO: 5940 - protein, 40 aa, Artificial Sequence
  Description of Artificial Sequence: Synthetic polypeptide
FEDNYALAVLDNGDPLNNTTPVTGASPGGLRELQLRSLTE

SEQ ID NO: 5941 - protein, 40 aa, Artificial Sequence
  Description of Artificial Sequence: Synthetic polypeptide
EDNYALAVLDNGDPLNNTTPVTGASPGGLRELQLRSLTEI

SEQ ID NO: 5942 - protein, 40 aa, Artificial Sequence
  Description of Artificial Sequence: Synthetic polypeptide
YALAVLDNGDPLNNTTPVTGASPGGLRELQLRSLTEILKG

SEQ ID NO: 5943 - protein, 40 aa, Artificial Sequence
  Description of Artificial Sequence: Synthetic polypeptide
MAVLDNGDPLNNTTPVTGASPGGLRELQLRSLTEILKGGV

SEQ ID NO: 5944 - protein, 40 aa, Artificial Sequence
  Description of Artificial Sequence: Synthetic polypeptide
GDPLNNTTPVTGASPGGLRELQLRSLTEILKGGVLIQRNP

SEQ ID NO: 5945 - protein, 40 aa, Artificial Sequence
  Description of Artificial Sequence: Synthetic polypeptide
PLNNTTPVTGASPGGLRELQLRSLTEILKGGVLIQRNPQL

SEQ ID NO: 5946 - protein, 40 aa, Artificial Sequence
  Description of Artificial Sequence: Synthetic polypeptide
MNNTTPVTGASPGGLRELQLRSLTEILKGGVLIQRNPQLC

SEQ ID NO: 5947 - protein, 40 aa, Artificial Sequence
  Description of Artificial Sequence: Synthetic polypeptide
NNTTPVTGASPGGLRELQLRSLTEILKGGVLIQRNPQLCY

SEQ ID NO: 5948 - protein, 40 aa, Artificial Sequence
  Description of Artificial Sequence: Synthetic polypeptide
NTTPVTGASPGGLRELQLRSLTEILKGGVLIQRNPQLCYQ

SEQ ID NO: 5949 - protein, 40 aa, Artificial Sequence
  Description of Artificial Sequence: Synthetic polypeptide
TTPVTGASPGGLRELQLRSLTEILKGGVLIQRNPQLCYQD

SEQ ID NO: 5950 - protein, 40 aa, Artificial Sequence
  Description of Artificial Sequence: Synthetic polypeptide
VTGASPGGLRELQLRSLTEILKGGVLIQRNPQLCYQDTIL

SEQ ID NO: 5951 - protein, 40 aa, Artificial Sequence
  Description of Artificial Sequence: Synthetic polypeptide
TGASPGGLRELQLRSLTEILKGGVLIQRNPQLCYQDTILW

SEQ ID NO: 5952 - protein, 40 aa, Artificial Sequence
  Description of Artificial Sequence: Synthetic polypeptide
HPCSPMCKGSRCWGESSEDCQSLTRTVCAGGCARCKGPLP

SEQ ID NO: 5953 - protein, 40 aa, Artificial Sequence
  Description of Artificial Sequence: Synthetic polypeptide
SRCWGESSEDCQSLTRTVCAGGCARCKGPLPTDCCHEQCA

SEQ ID NO: 5954 - protein, 40 aa, Artificial Sequence
  Description of Artificial Sequence: Synthetic polypeptide
KGPLPTDCCHEQCAAGCTGPKHSDCLACLHFNHSGICELH

SEQ ID NO: 5955 - protein, 40 aa, Artificial Sequence
  Description of Artificial Sequence: Synthetic polypeptide
TFGASCVTACPYNYLSTDVGSCTLVCPLHNQEVTAEDGTQ

SEQ ID NO: 5956 - protein, 40 aa, Artificial Sequence
  Description of Artificial Sequence: Synthetic polypeptide
MHNQEVTAEDGTQRCEKCSKPCARVCYGLGMEHLREVRAV

SEQ ID NO: 5957 - protein, 40 aa, Artificial Sequence
  Description of Artificial Sequence: Synthetic polypeptide
EVTAEDGTQRCEKCSKPCARVCYGLGMEHLREVRAVTSAN

SEQ ID NO: 5958 - protein, 40 aa, Artificial Sequence
  Description of Artificial Sequence: Synthetic polypeptide
EDGTQRCEKCSKPCARVCYGLGMEHLREVRAVTSANIQEF

SEQ ID NO: 5959 - protein, 40 aa, Artificial Sequence
  Description of Artificial Sequence: Synthetic polypeptide
GTQRCEKCSKPCARVCYGLGMEHLREVRAVTSANIQEFAG

SEQ ID NO: 5960 - protein, 40 aa, Artificial Sequence
  Description of Artificial Sequence: Synthetic polypeptide
PCARVCYGLGMEHLREVRAVTSANIQEFAGCKKIFGSLAF

SEQ ID NO: 5961 - protein, 40 aa, Artificial Sequence
  Description of Artificial Sequence: Synthetic polypeptide
CYGLGMEHLREVRAVTSANIQEFAGCKKIFGSLAFLPESF

SEQ ID NO: 5962 - protein, 40 aa, Artificial Sequence
  Description of Artificial Sequence: Synthetic polypeptide
RGRILHNGAYSLTLQGLGISWLGLRSLRELGSGLALIHHN

SEQ ID NO: 5963 - protein, 40 aa, Artificial Sequence
  Description of Artificial Sequence: Synthetic polypeptide
YSLTLQGLGISWLGLRSLRELGSGLALIHHNTHLCFVHTV

SEQ ID NO: 5964 - protein, 40 aa, Artificial Sequence
  Description of Artificial Sequence: Synthetic polypeptide
SLTLQGLGISWLGLRSLRELGSGLALIHHNTHLCFVHTVP

SEQ ID NO: 5965 - protein, 40 aa, Artificial Sequence
  Description of Artificial Sequence: Synthetic polypeptide
CVDLDDKGCPAEQRASPLTSIISAVVGILLVVVLGVVFGI

SEQ ID NO: 5966 - protein, 40 aa, Artificial Sequence
  Description of Artificial Sequence: Synthetic polypeptide
GCPAEQRASPLTSIISAVVGILLVVVLGVVFGILIKRRQQ

SEQ ID NO: 5967 - protein, 40 aa, Artificial Sequence
  Description of Artificial Sequence: Synthetic polypeptide
CPAEQRASPLTSIISAVVGILLVVVLGVVFGILIKRRQQK

SEQ ID NO: 5968 - protein, 40 aa, Artificial Sequence
  Description of Artificial Sequence: Synthetic polypeptide
IRKYTMRRLLQETELVEPLTPSGAMPNQAQMRILKETELR

SEQ ID NO: 5969 - protein, 40 aa, Artificial Sequence
  Description of Artificial Sequence: Synthetic polypeptide
TMRRLLQETELVEPLTPSGAMPNQAQMRILKETELRKVKV

SEQ ID NO: 5970 - protein, 40 aa, Artificial Sequence
  Description of Artificial Sequence: Synthetic polypeptide
MRRLLQETELVEPLTPSGAMPNQAQMRILKETELRKVKVL

SEQ ID NO: 5971 - protein, 40 aa, Artificial Sequence
  Description of Artificial Sequence: Synthetic polypeptide
ETELRKVKVLGSGAFGTVYKGIWIPDGENVKIPVAIKVLR

SEQ ID NO: 5972 - protein, 40 aa, Artificial Sequence
  Description of Artificial Sequence: Synthetic polypeptide
GTVYKGIWIPDGENVKIPVAIKVLRENTSPKANKEILDEA

SEQ ID NO: 5973 - protein, 40 aa, Artificial Sequence
  Description of Artificial Sequence: Synthetic polypeptide
RLLGICLTSTVQLVTQLMPYGCLLDHVRENRGRLGSQDLL

SEQ ID NO: 5974 - protein, 40 aa, Artificial Sequence
  Description of Artificial Sequence: Synthetic polypeptide
SLLEDDDMGDLVDAEEYLVPQQGFFCPDPAPGAGGMVHHR

SEQ ID NO: 5975 - protein, 40 aa, Artificial Sequence
  Description of Artificial Sequence: Synthetic polypeptide
DPAPGAGGMVHHRHRSSSTRSGGGDLTLGLEPSEEEAPRS

SEQ ID NO: 5976 - protein, 40 aa, Artificial Sequence
  Description of Artificial Sequence: Synthetic polypeptide
PGAGGMVHHRHRSSSTRSGGGDLTLGLEPSEEEAPRSPLA

SEQ ID NO: 5977 - protein, 40 aa, Artificial Sequence
  Description of Artificial Sequence: Synthetic polypeptide
GMVHHRHRSSSTRSGGGDLTLGLEPSEEEAPRSPLAPSEG

SEQ ID NO: 5978 - protein, 40 aa, Artificial Sequence
  Description of Artificial Sequence: Synthetic polypeptide
SSSTRSGGGDLTLGLEPSEEEAPRSPLAPSEGAGSDVFDG

SEQ ID NO: 5979 - protein, 40 aa, Artificial Sequence
  Description of Artificial Sequence: Synthetic polypeptide
QPHPPPAFSPAFDNLYYWDQDPPERGAPPSTFKGTPTAEN

SEQ ID NO: 5980 - protein, 40 aa, Artificial Sequence
  Description of Artificial Sequence: Synthetic polypeptide
AFSPAFDNLYYWDQDPPERGAPPSTFKGTPTAENPEYLGL

SEQ ID NO: 5981 - protein, 40 aa, Artificial Sequence
  Description of Artificial Sequence: Synthetic polypeptide
MGLLFSLARGSEVGNSQAVCPGTLNGLSVTGDAENQYQTL

SEQ ID NO: 5982 - protein, 40 aa, Artificial Sequence
  Description of Artificial Sequence: Synthetic polypeptide
RGSEVGNSQAVCPGTLNGLSVTGDAENQYQTLYKLYERCE

SEQ ID NO: 5983 - protein, 40 aa, Artificial Sequence
  Description of Artificial Sequence: Synthetic polypeptide
MGNLEIVLTGHNADLSFLQWIREVTGYVLVAMNEFSTLPL

SEQ ID NO: 5984 - protein, 40 aa, Artificial Sequence
  Description of Artificial Sequence: Synthetic polypeptide
VYDGKFAIFVMLNYNTNSSHALRQLRLTQLTEILSGGVYI

SEQ ID NO: 5985 - protein, 40 aa, Artificial Sequence
  Description of Artificial Sequence: Synthetic polypeptide
FAIFVMLNYNTNSSHALRQLRLTQLTEILSGGVYIEKNDK

SEQ ID NO: 5986 - protein, 40 aa, Artificial Sequence
  Description of Artificial Sequence: Synthetic polypeptide
RACPPDKMEVDKNGLKMCEPCGGLCPKACEGTGSGSRFQT

SEQ ID NO: 5987 - protein, 40 aa, Artificial Sequence
  Description of Artificial Sequence: Synthetic polypeptide
DKMEVDKNGLKMCEPCGGLCPKACEGTGSGSRFQTVDSSN

SEQ ID NO: 5988 - protein, 40 aa, Artificial Sequence
  Description of Artificial Sequence: Synthetic polypeptide
VDKNGLKMCEPCGGLCPKACEGTGSGSRFQTVDSSNIDGF

SEQ ID NO: 5989 - protein, 40 aa, Artificial Sequence
  Description of Artificial Sequence: Synthetic polypeptide
GLKMCEPCGGLCPKACEGTGSGSRFQTVDSSNIDGFVNCT

SEQ ID NO: 5990 - protein, 40 aa, Artificial Sequence
  Description of Artificial Sequence: Synthetic polypeptide
VREITGYLNIQSWPPHMHNFSVFSNLTTIGGRSLYNRGFS

SEQ ID NO: 5991 - protein, 40 aa, Artificial Sequence
  Description of Artificial Sequence: Synthetic polypeptide
ITGYLNIQSWPPHMHNFSVFSNLTTIGGRSLYNRGFSLLI

SEQ ID NO: 5992 - protein, 40 aa, Artificial Sequence
  Description of Artificial Sequence: Synthetic polypeptide
YLNIQSWPPHMHNFSVFSNLTTIGGRSLYNRGFSLLIMKN

SEQ ID NO: 5993 - protein, 40 aa, Artificial Sequence
  Description of Artificial Sequence: Synthetic polypeptide
NIQSWPPHMHNFSVFSNLTTIGGRSLYNRGFSLLIMKNLN

SEQ ID NO: 5994 - protein, 40 aa, Artificial Sequence
  Description of Artificial Sequence: Synthetic polypeptide
IQSWPPHMHNFSVFSNLTTIGGRSLYNRGFSLLIMKNLNV

SEQ ID NO: 5995 - protein, 40 aa, Artificial Sequence
  Description of Artificial Sequence: Synthetic polypeptide
PPHMHNFSVFSNLTTIGGRSLYNRGFSLLIMKNLNVTSLG

SEQ ID NO: 5996 - protein, 40 aa, Artificial Sequence
  Description of Artificial Sequence: Synthetic polypeptide
HMHNFSVFSNLTTIGGRSLYNRGFSLLIMKNLNVTSLGFR

SEQ ID NO: 5997 - protein, 40 aa, Artificial Sequence
  Description of Artificial Sequence: Synthetic polypeptide
MHNFSVFSNLTTIGGRSLYNRGFSLLIMKNLNVTSLGFRS

SEQ ID NO: 5998 - protein, 40 aa, Artificial Sequence
  Description of Artificial Sequence: Synthetic polypeptide
HNFSVFSNLTTIGGRSLYNRGFSLLIMKNLNVTSLGFRSL

SEQ ID NO: 5999 - protein, 40 aa, Artificial Sequence
  Description of Artificial Sequence: Synthetic polypeptide
FSVFSNLTTIGGRSLYNRGFSLLIMKNLNVTSLGFRSLKE

SEQ ID NO: 6000 - protein, 40 aa, Artificial Sequence
  Description of Artificial Sequence: Synthetic polypeptide
SVFSNLTTIGGRSLYNRGFSLLIMKNLNVTSLGFRSLKEI

SEQ ID NO: 6001 - protein, 40 aa, Artificial Sequence
  Description of Artificial Sequence: Synthetic polypeptide
SNLTTIGGRSLYNRGFSLLIMKNLNVTSLGFRSLKEISAG

SEQ ID NO: 6002 - protein, 40 aa, Artificial Sequence
  Description of Artificial Sequence: Synthetic polypeptide
NLTTIGGRSLYNRGFSLLIMKNLNVTSLGFRSLKEISAGR

SEQ ID NO: 6003 - protein, 40 aa, Artificial Sequence
  Description of Artificial Sequence: Synthetic polypeptide
MTTIGGRSLYNRGFSLLIMKNLNVTSLGFRSLKEISAGRI

SEQ ID NO: 6004 - protein, 40 aa, Artificial Sequence
  Description of Artificial Sequence: Synthetic polypeptide
TTIGGRSLYNRGFSLLIMKNLNVTSLGFRSLKEISAGRIY

SEQ ID NO: 6005 - protein, 40 aa, Artificial Sequence
  Description of Artificial Sequence: Synthetic polypeptide
TIGGRSLYNRGFSLLIMKNLNVTSLGFRSLKEISAGRIYI

SEQ ID NO: 6006 - protein, 40 aa, Artificial Sequence
  Description of Artificial Sequence: Synthetic polypeptide
IGGRSLYNRGFSLLIMKNLNVTSLGFRSLKEISAGRIYIS

SEQ ID NO: 6007 - protein, 40 aa, Artificial Sequence
  Description of Artificial Sequence: Synthetic polypeptide
GGRSLYNRGFSLLIMKNLNVTSLGFRSLKEISAGRIYISA

SEQ ID NO: 6008 - protein, 40 aa, Artificial Sequence
  Description of Artificial Sequence: Synthetic polypeptide
GRSLYNRGFSLLIMKNLNVTSLGFRSLKEISAGRIYISAN

SEQ ID NO: 6009 - protein, 40 aa, Artificial Sequence
  Description of Artificial Sequence: Synthetic polypeptide
RSLYNRGFSLLIMKNLNVTSLGFRSLKEISAGRIYISANR

SEQ ID NO: 6010 - protein, 40 aa, Artificial Sequence
  Description of Artificial Sequence: Synthetic polypeptide
SLYNRGFSLLIMKNLNVTSLGFRSLKEISAGRIYISANRQ

SEQ ID NO: 6011 - protein, 40 aa, Artificial Sequence
  Description of Artificial Sequence: Synthetic polypeptide
YNRGFSLLIMKNLNVTSLGFRSLKEISAGRIYISANRQLC

SEQ ID NO: 6012 - protein, 40 aa, Artificial Sequence
  Description of Artificial Sequence: Synthetic polypeptide
NRGFSLLIMKNLNVTSLGFRSLKEISAGRIYISANRQLCY

SEQ ID NO: 6013 - protein, 40 aa, Artificial Sequence
  Description of Artificial Sequence: Synthetic polypeptide
RGFSLLIMKNLNVTSLGFRSLKEISAGRIYISANRQLCYH

SEQ ID NO: 6014 - protein, 40 aa, Artificial Sequence
  Description of Artificial Sequence: Synthetic polypeptide
GFSLLIMKNLNVTSLGFRSLKEISAGRIYISANRQLCYHH

SEQ ID NO: 6015 - protein, 40 aa, Artificial Sequence
  Description of Artificial Sequence: Synthetic polypeptide
ANRQLCYHHSLNWTKVLRGPTEERLDIKHNRPRRDCVAEG

SEQ ID NO: 6016 - protein, 40 aa, Artificial Sequence
  Description of Artificial Sequence: Synthetic polypeptide
SSGGCWGPGPGQCLSCRNYSRGGVCVTHCNFLNGEPREFA

SEQ ID NO: 6017 - protein, 40 aa, Artificial Sequence
  Description of Artificial Sequence: Synthetic polypeptide
VLIGKTHLTMALTVIAGLVVIFMMLGGTFLYWRGRRIQNK

SEQ ID NO: 6018 - protein, 40 aa, Artificial Sequence
  Description of Artificial Sequence: Synthetic polypeptide
GKTHLTMALTVIAGLVVIFMMLGGTFLYWRGRRIQNKRAM

SEQ ID NO: 6019 - protein, 40 aa, Artificial Sequence
  Description of Artificial Sequence: Synthetic polypeptide
KTHLTMALTVIAGLVVIFMMLGGTFLYWRGRRIQNKRAMR

SEQ ID NO: 6020 - protein, 40 aa, Artificial Sequence
  Description of Artificial Sequence: Synthetic polypeptide
ALTVIAGLVVIFMMLGGTFLYWRGRRIQNKRAMRRYLERG

SEQ ID NO: 6021 - protein, 40 aa, Artificial Sequence
  Description of Artificial Sequence: Synthetic polypeptide
MTVIAGLVVIFMMLGGTFLYWRGRRIQNKRAMRRYLERGE

SEQ ID NO: 6022 - protein, 40 aa, Artificial Sequence
  Description of Artificial Sequence: Synthetic polypeptide
MVVIFMMLGGTFLYWRGRRIQNKRAMRRYLERGESIEPLD

SEQ ID NO: 6023 - protein, 40 aa, Artificial Sequence
  Description of Artificial Sequence: Synthetic polypeptide
VIFMMLGGTFLYWRGRRIQNKRAMRRYLERGESIEPLDPS

SEQ ID NO: 6024 - protein, 40 aa, Artificial Sequence
  Description of Artificial Sequence: Synthetic polypeptide
IFMMLGGTFLYWRGRRIQNKRAMRRYLERGESIEPLDPSE

SEQ ID NO: 6025 - protein, 40 aa, Artificial Sequence
  Description of Artificial Sequence: Synthetic polypeptide
MGGTFLYWRGRRIQNKRAMRRYLERGESIEPLDPSEKANK

SEQ ID NO: 6026 - protein, 40 aa, Artificial Sequence
  Description of Artificial Sequence: Synthetic polypeptide
GGTFLYWRGRRIQNKRAMRRYLERGESIEPLDPSEKANKV

SEQ ID NO: 6027 - protein, 40 aa, Artificial Sequence
  Description of Artificial Sequence: Synthetic polypeptide
GTFLYWRGRRIQNKRAMRRYLERGESIEPLDPSEKANKVL

SEQ ID NO: 6028 - protein, 40 aa, Artificial Sequence
  Description of Artificial Sequence: Synthetic polypeptide
WRGRRIQNKRAMRRYLERGESIEPLDPSEKANKVLARIFK

SEQ ID NO: 6029 - protein, 40 aa, Artificial Sequence
  Description of Artificial Sequence: Synthetic polypeptide
RGRRIQNKRAMRRYLERGESIEPLDPSEKANKVLARIFKE

SEQ ID NO: 6030 - protein, 40 aa, Artificial Sequence
  Description of Artificial Sequence: Synthetic polypeptide
IQNKRAMRRYLERGESIEPLDPSEKANKVLARIFKETELR

SEQ ID NO: 6031 - protein, 40 aa, Artificial Sequence
  Description of Artificial Sequence: Synthetic polypeptide
RYLERGESIEPLDPSEKANKVLARIFKETELRKLKVLGSG

SEQ ID NO: 6032 - protein, 40 aa, Artificial Sequence
  Description of Artificial Sequence: Synthetic polypeptide
YLERGESIEPLDPSEKANKVLARIFKETELRKLKVLGSGV

SEQ ID NO: 6033 - protein, 40 aa, Artificial Sequence
  Description of Artificial Sequence: Synthetic polypeptide
DPSEKANKVLARIFKETELRKLKVLGSGVFGTVHKGVWIP

SEQ ID NO: 6034 - protein, 40 aa, Artificial Sequence
  Description of Artificial Sequence: Synthetic polypeptide
SIKIPVCIKVIEDKSGRQSFQAVTDHMLAIGSLDHAHIVR

SEQ ID NO: 6035 - protein, 40 aa, Artificial Sequence
  Description of Artificial Sequence: Synthetic polypeptide
PLGSLLDHVRQHRGALGPQLLLNWGVQIAKGMYYLEEHGM

SEQ ID NO: 6036 - protein, 40 aa, Artificial Sequence
  Description of Artificial Sequence: Synthetic polypeptide
SLLDHVRQHRGALGPQLLLNWGVQIAKGMYYLEEHGMVHR

SEQ ID NO: 6037 - protein, 40 aa, Artificial Sequence
  Description of Artificial Sequence: Synthetic polypeptide
GALGPQLLLNWGVQIAKGMYYLEEHGMVHRNLAARNVLLK

SEQ ID NO: 6038 - protein, 40 aa, Artificial Sequence
  Description of Artificial Sequence: Synthetic polypeptide
MALESIHFGKYTHQSDVWSYGVTVWELMTFGAEPYAGLRL

SEQ ID NO: 6039 - protein, 40 aa, Artificial Sequence
  Description of Artificial Sequence: Synthetic polypeptide
KYTHQSDVWSYGVTVWELMTFGAEPYAGLRLAEVPDLLEK

SEQ ID NO: 6040 - protein, 40 aa, Artificial Sequence
  Description of Artificial Sequence: Synthetic polypeptide
ELMTFGAEPYAGLRLAEVPDLLEKGERLAQPQICTIDVYM

SEQ ID NO: 6041 - protein, 40 aa, Artificial Sequence
  Description of Artificial Sequence: Synthetic polypeptide
FTRMARDPPRYLVIKRESGPGIAPGPEPHGLTNKKLEEVE

SEQ ID NO: 6042 - protein, 40 aa, Artificial Sequence
  Description of Artificial Sequence: Synthetic polypeptide
RDPPRYLVIKRESGPGIAPGPEPHGLTNKKLEEVELEPEL

SEQ ID NO: 6043 - protein, 40 aa, Artificial Sequence
  Description of Artificial Sequence: Synthetic polypeptide
YLVIKRESGPGIAPGPEPHGLTNKKLEEVELEPELDLDLD

SEQ ID NO: 6044 - protein, 40 aa, Artificial Sequence
  Description of Artificial Sequence: Synthetic polypeptide
IKRESGPGIAPGPEPHGLTNKKLEEVELEPELDLDLDLEA

SEQ ID NO: 6045 - protein, 40 aa, Artificial Sequence
  Description of Artificial Sequence: Synthetic polypeptide
LNRPRGSQSLLSPSSGYMPMNQGNLGESCQESAVSGSSER

SEQ ID NO: 6046 - protein, 40 aa, Artificial Sequence
  Description of Artificial Sequence: Synthetic polypeptide
SLLTPVTPLSPPGLEEEDVNGYVMPDTHLKGTPSSREGTL

SEQ ID NO: 6047 - protein, 40 aa, Artificial Sequence
  Description of Artificial Sequence: Synthetic polypeptide
VTPLSPPGLEEEDVNGYVMPDTHLKGTPSSREGTLSSVGL

SEQ ID NO: 6048 - protein, 40 aa, Artificial Sequence
  Description of Artificial Sequence: Synthetic polypeptide
PPGLEEEDVNGYVMPDTHLKGTPSSREGTLSSVGLSSVLG

SEQ ID NO: 6049 - protein, 40 aa, Artificial Sequence
  Description of Artificial Sequence: Synthetic polypeptide
PGLEEEDVNGYVMPDTHLKGTPSSREGTLSSVGLSSVLGT

SEQ ID NO: 6050 - protein, 40 aa, Artificial Sequence
  Description of Artificial Sequence: Synthetic polypeptide
GLEEEDVNGYVMPDTHLKGTPSSREGTLSSVGLSSVLGTE

SEQ ID NO: 6051 - protein, 40 aa, Artificial Sequence
  Description of Artificial Sequence: Synthetic polypeptide
EGTLSSVGLSSVLGTEEEDEDEEYEYMNRRRRHSPPHPPR

SEQ ID NO: 6052 - protein, 40 aa, Artificial Sequence
  Description of Artificial Sequence: Synthetic polypeptide
YEYMNRQRDGGGPGGDYAAMGACPASEQGYEEMRAFQGPG

SEQ ID NO: 6053 - protein, 40 aa, Artificial Sequence
  Description of Artificial Sequence: Synthetic polypeptide
NRQRDGGGPGGDYAAMGACPASEQGYEEMRAFQGPGHQAP

SEQ ID NO: 6054 - protein, 40 aa, Artificial Sequence
  Description of Artificial Sequence: Synthetic polypeptide
DGGGPGGDYAAMGACPASEQGYEEMRAFQGPGHQAPHVHY

SEQ ID NO: 6055 - protein, 40 aa, Artificial Sequence
  Description of Artificial Sequence: Synthetic polypeptide
GGGPGGDYAAMGACPASEQGYEEMRAFQGPGHQAPHVHYA

SEQ ID NO: 6056 - protein, 40 aa, Artificial Sequence
  Description of Artificial Sequence: Synthetic polypeptide
GGPGGDYAAMGACPASEQGYEEMRAFQGPGHQAPHVHYAR

SEQ ID NO: 6057 - protein, 40 aa, Artificial Sequence
  Description of Artificial Sequence: Synthetic polypeptide
GPGGDYAAMGACPASEQGYEEMRAFQGPGHQAPHVHYARL

SEQ ID NO: 6058 - protein, 40 aa, Artificial Sequence
  Description of Artificial Sequence: Synthetic polypeptide
YAAMGACPASEQGYEEMRAFQGPGHQAPHVHYARLKTLRS

SEQ ID NO: 6059 - protein, 40 aa, Artificial Sequence
  Description of Artificial Sequence: Synthetic polypeptide
GACPASEQGYEEMRAFQGPGHQAPHVHYARLKTLRSLEAT

SEQ ID NO: 6060 - protein, 40 aa, Artificial Sequence
  Description of Artificial Sequence: Synthetic polypeptide
ACPASEQGYEEMRAFQGPGHQAPHVHYARLKTLRSLEATD

SEQ ID NO: 6061 - protein, 40 aa, Artificial Sequence
  Description of Artificial Sequence: Synthetic polypeptide
PASEQGYEEMRAFQGPGHQAPHVHYARLKTLRSLEATDSA

SEQ ID NO: 6062 - protein, 40 aa, Artificial Sequence
  Description of Artificial Sequence: Synthetic polypeptide
GYEEMRAFQGPGHQAPHVHYARLKTLRSLEATDSAFDNPD

SEQ ID NO: 6063 - protein, 40 aa, Artificial Sequence
  Description of Artificial Sequence: Synthetic polypeptide
EEMRAFQGPGHQAPHVHYARLKTLRSLEATDSAFDNPDYW

SEQ ID NO: 6064 - protein, 40 aa, Artificial Sequence
  Description of Artificial Sequence: Synthetic polypeptide
EMRAFQGPGHQAPHVHYARLKTLRSLEATDSAFDNPDYWH

SEQ ID NO: 6065 - protein, 40 aa, Artificial Sequence
  Description of Artificial Sequence: Synthetic polypeptide
ENKLSSLSDLEQQYRALRKYYENCEVVMGNLEITSIEHNR

SEQ ID NO: 6066 - protein, 40 aa, Artificial Sequence
  Description of Artificial Sequence: Synthetic polypeptide
CEVVMGNLEITSIEHNRDLSFLRSVREVTGYVLVALNQFR

SEQ ID NO: 6067 - protein, 40 aa, Artificial Sequence
  Description of Artificial Sequence: Synthetic polypeptide
EHNRDLSFLRSVREVTGYVLVALNQFRYLPLENLRIIRGT

SEQ ID NO: 6068 - protein, 40 aa, Artificial Sequence
  Description of Artificial Sequence: Synthetic polypeptide
NRDLSFLRSVREVTGYVLVALNQFRYLPLENLRIIRGTKL

SEQ ID NO: 6069 - protein, 40 aa, Artificial Sequence
  Description of Artificial Sequence: Synthetic polypeptide
FLRSVREVTGYVLVALNQFRYLPLENLRIIRGTKLYEDRY

SEQ ID NO: 6070 - protein, 40 aa, Artificial Sequence
  Description of Artificial Sequence: Synthetic polypeptide
MRSVREVTGYVLVALNQFRYLPLENLRIIRGTKLYEDRYA

SEQ ID NO: 6071 - protein, 40 aa, Artificial Sequence
  Description of Artificial Sequence: Synthetic polypeptide
TGYVLVALNQFRYLPLENLRIIRGTKLYEDRYALAIFLNY

SEQ ID NO: 6072 - protein, 40 aa, Artificial Sequence
  Description of Artificial Sequence: Synthetic polypeptide
VALNQFRYLPLENLRIIRGTKLYEDRYALAIFLNYRKDGN

SEQ ID NO: 6073 - protein, 40 aa, Artificial Sequence
  Description of Artificial Sequence: Synthetic polypeptide
LNQFRYLPLENLRIIRGTKLYEDRYALAIFLNYRKDGNFG

SEQ ID NO: 6074 - protein, 40 aa, Artificial Sequence
  Description of Artificial Sequence: Synthetic polypeptide
QFRYLPLENLRIIRGTKLYEDRYALAIFLNYRKDGNFGLQ

SEQ ID NO: 6075 - protein, 40 aa, Artificial Sequence
  Description of Artificial Sequence: Synthetic polypeptide
RYLPLENLRIIRGTKLYEDRYALAIFLNYRKDGNFGLQEL

SEQ ID NO: 6076 - protein, 40 aa, Artificial Sequence
  Description of Artificial Sequence: Synthetic polypeptide
MPLENLRIIRGTKLYEDRYALAIFLNYRKDGNFGLQELGL

SEQ ID NO: 6077 - protein, 40 aa, Artificial Sequence
  Description of Artificial Sequence: Synthetic polypeptide
PLENLRIIRGTKLYEDRYALAIFLNYRKDGNFGLQELGLK

SEQ ID NO: 6078 - protein, 40 aa, Artificial Sequence
  Description of Artificial Sequence: Synthetic polypeptide
MENLRIIRGTKLYEDRYALAIFLNYRKDGNFGLQELGLKN

SEQ ID NO: 6079 - protein, 40 aa, Artificial Sequence
  Description of Artificial Sequence: Synthetic polypeptide
LRIIRGTKLYEDRYALAIFLNYRKDGNFGLQELGLKNLTE

SEQ ID NO: 6080 - protein, 40 aa, Artificial Sequence
  Description of Artificial Sequence: Synthetic polypeptide
TKLYEDRYALAIFLNYRKDGNFGLQELGLKNLTEILNGGV

SEQ ID NO: 6081 - protein, 40 aa, Artificial Sequence
  Description of Artificial Sequence: Synthetic polypeptide
LNYRKDGNFGLQELGLKNLTEILNGGVYVDQNKFLCYADT

SEQ ID NO: 6082 - protein, 40 aa, Artificial Sequence
  Description of Artificial Sequence: Synthetic polypeptide
YRKDGNFGLQELGLKNLTEILNGGVYVDQNKFLCYADTIH

SEQ ID NO: 6083 - protein, 40 aa, Artificial Sequence
  Description of Artificial Sequence: Synthetic polypeptide
RKDGNFGLQELGLKNLTEILNGGVYVDQNKFLCYADTIHW

SEQ ID NO: 6084 - protein, 40 aa, Artificial Sequence
  Description of Artificial Sequence: Synthetic polypeptide
KDGNFGLQELGLKNLTEILNGGVYVDQNKFLCYADTIHWQ

SEQ ID NO: 6085 - protein, 40 aa, Artificial Sequence
  Description of Artificial Sequence: Synthetic polypeptide
IVRNPWPSNLTLVSTNGSSGCGRCHKSCTGRCWGPTENHC

SEQ ID NO: 6086 - protein, 40 aa, Artificial Sequence
  Description of Artificial Sequence: Synthetic polypeptide
LVSTNGSSGCGRCHKSCTGRCWGPTENHCQTLTRTVCAEQ

SEQ ID NO: 6087 - protein, 40 aa, Artificial Sequence
  Description of Artificial Sequence: Synthetic polypeptide
TVCAEQCDGRCYGPYVSDCCHRECAGGCSGPKDTDCFACM

SEQ ID NO: 6088 - protein, 40 aa, Artificial Sequence
  Description of Artificial Sequence: Synthetic polypeptide
YGAFCVKKCPHNFVVDSSSCVRACPSSKMEVEENGIKMCK

SEQ ID NO: 6089 - protein, 40 aa, Artificial Sequence
  Description of Artificial Sequence: Synthetic polypeptide
GAFCVKKCPHNFVVDSSSCVRACPSSKMEVEENGIKMCKP

SEQ ID NO: 6090 - protein, 40 aa, Artificial Sequence
  Description of Artificial Sequence: Synthetic polypeptide
NGIKMCKPCTDICPKACDGIGTGSLMSAQTVDSSNIDKFI

SEQ ID NO: 6091 - protein, 40 aa, Artificial Sequence
  Description of Artificial Sequence: Synthetic polypeptide
CTDICPKACDGIGTGSLMSAQTVDSSNIDKFINCTKINGN

SEQ ID NO: 6092 - protein, 40 aa, Artificial Sequence
  Description of Artificial Sequence: Synthetic polypeptide
CDGIGTGSLMSAQTVDSSNIDKFINCTKINGNLIFLVTGI

SEQ ID NO: 6093 - protein, 40 aa, Artificial Sequence
  Description of Artificial Sequence: Synthetic polypeptide
DKFINCTKINGNLIFLVTGIHGDPYNAIEAIDPEKLNVFR

SEQ ID NO: 6094 - protein, 40 aa, Artificial Sequence
  Description of Artificial Sequence: Synthetic polypeptide
KFINCTKINGNLIFLVTGIHGDPYNAIEAIDPEKLNVFRT

SEQ ID NO: 6095 - protein, 40 aa, Artificial Sequence
  Description of Artificial Sequence: Synthetic polypeptide
INCTKINGNLIFLVTGIHGDPYNAIEAIDPEKLNVFRTVR

SEQ ID NO: 6096 - protein, 40 aa, Artificial Sequence
  Description of Artificial Sequence: Synthetic polypeptide
CTKINGNLIFLVTGIHGDPYNAIEAIDPEKLNVFRTVREI

SEQ ID NO: 6097 - protein, 40 aa, Artificial Sequence
  Description of Artificial Sequence: Synthetic polypeptide
VFRTVREITGFLNIQSWPPNMTDFSVFSNLVTIGGRVLYS

SEQ ID NO: 6098 - protein, 40 aa, Artificial Sequence
  Description of Artificial Sequence: Synthetic polypeptide
ITGFLNIQSWPPNMTDFSVFSNLVTIGGRVLYSGLSLLIL

SEQ ID NO: 6099 - protein, 40 aa, Artificial Sequence
  Description of Artificial Sequence: Synthetic polypeptide
FLNIQSWPPNMTDFSVFSNLVTIGGRVLYSGLSLLILKQQ

SEQ ID NO: 6100 - protein, 40 aa, Artificial Sequence
  Description of Artificial Sequence: Synthetic polypeptide
QSWPPNMTDFSVFSNLVTIGGRVLYSGLSLLILKQQGITS

SEQ ID NO: 6101 - protein, 40 aa, Artificial Sequence
  Description of Artificial Sequence: Synthetic polypeptide
SWPPNMTDFSVFSNLVTIGGRVLYSGLSLLILKQQGITSL

SEQ ID NO: 6102 - protein, 40 aa, Artificial Sequence
  Description of Artificial Sequence: Synthetic polypeptide
VFSNLVTIGGRVLYSGLSLLILKQQGITSLQFQSLKEISA

SEQ ID NO: 6103 - protein, 40 aa, Artificial Sequence
  Description of Artificial Sequence: Synthetic polypeptide
SGLSLLILKQQGITSLQFQSLKEISAGNIYITDNSNLCYY

SEQ ID NO: 6104 - protein, 40 aa, Artificial Sequence
  Description of Artificial Sequence: Synthetic polypeptide
MCYYHTINWTTLFSTINQRIVIRDNRKAENCTAEGMVCNH

SEQ ID NO: 6105 - protein, 40 aa, Artificial Sequence
  Description of Artificial Sequence: Synthetic polypeptide
SDGCWGPGPDQCLSCRRFSRGRICIESCNLYDGEFREFEN

SEQ ID NO: 6106 - protein, 40 aa, Artificial Sequence
  Description of Artificial Sequence: Synthetic polypeptide
DGCWGPGPDQCLSCRRFSRGRICIESCNLYDGEFREFENG

SEQ ID NO: 6107 - protein, 40 aa, Artificial Sequence
  Description of Artificial Sequence: Synthetic polypeptide
GPDQCLSCRRFSRGRICIESCNLYDGEFREFENGSICVEC

SEQ ID NO: 6108 - protein, 40 aa, Artificial Sequence
  Description of Artificial Sequence: Synthetic polypeptide
SHFKDGPNCVEKCPDGLQGANSFIFKYADPDRECHPCHPN

SEQ ID NO: 6109 - protein, 40 aa, Artificial Sequence
  Description of Artificial Sequence: Synthetic polypeptide
YYPWTGHSTLPQHARTPLIAAGVIGGLFILVIVGLTFAVY

SEQ ID NO: 6110 - protein, 40 aa, Artificial Sequence
  Description of Artificial Sequence: Synthetic polypeptide
WTGHSTLPQHARTPLIAAGVIGGLFILVIVGLTFAVYVRR

SEQ ID NO: 6111 - protein, 40 aa, Artificial Sequence
  Description of Artificial Sequence: Synthetic polypeptide
TGHSTLPQHARTPLIAAGVIGGLFILVIVGLTFAVYVRRK

SEQ ID NO: 6112 - protein, 40 aa, Artificial Sequence
  Description of Artificial Sequence: Synthetic polypeptide
TLPQHARTPLIAAGVIGGLFILVIVGLTFAVYVRRKSIKK

SEQ ID NO: 6113 - protein, 40 aa, Artificial Sequence
  Description of Artificial Sequence: Synthetic polypeptide
LPQHARTPLIAAGVIGGLFILVIVGLTFAVYVRRKSIKKK

SEQ ID NO: 6114 - protein, 40 aa, Artificial Sequence
  Description of Artificial Sequence: Synthetic polypeptide
HARTPLIAAGVIGGLFILVIVGLTFAVYVRRKSIKKKRAL

SEQ ID NO: 6115 - protein, 40 aa, Artificial Sequence
  Description of Artificial Sequence: Synthetic polypeptide
MIAAGVIGGLFILVIVGLTFAVYVRRKSIKKKRALRRFLE

SEQ ID NO: 6116 - protein, 40 aa, Artificial Sequence
  Description of Artificial Sequence: Synthetic polypeptide
AAGVIGGLFILVIVGLTFAVYVRRKSIKKKRALRRFLETE

SEQ ID NO: 6117 - protein, 40 aa, Artificial Sequence
  Description of Artificial Sequence: Synthetic polypeptide
GGLFILVIVGLTFAVYVRRKSIKKKRALRRFLETELVEPL

SEQ ID NO: 6118 - protein, 40 aa, Artificial Sequence
  Description of Artificial Sequence: Synthetic polypeptide
GLFILVIVGLTFAVYVRRKSIKKKRALRRFLETELVEPLT

SEQ ID NO: 6119 - protein, 40 aa, Artificial Sequence
  Description of Artificial Sequence: Synthetic polypeptide
LFILVIVGLTFAVYVRRKSIKKKRALRRFLETELVEPLTP

SEQ ID NO: 6120 - protein, 40 aa, Artificial Sequence
  Description of Artificial Sequence: Synthetic polypeptide
FILVIVGLTFAVYVRRKSIKKKRALRRFLETELVEPLTPS

SEQ ID NO: 6121 - protein, 40 aa, Artificial Sequence
  Description of Artificial Sequence: Synthetic polypeptide
ILVIVGLTFAVYVRRKSIKKKRALRRFLETELVEPLTPSG

SEQ ID NO: 6122 - protein, 40 aa, Artificial Sequence
  Description of Artificial Sequence: Synthetic polypeptide
IVGLTFAVYVRRKSIKKKRALRRFLETELVEPLTPSGTAP

SEQ ID NO: 6123 - protein, 40 aa, Artificial Sequence
  Description of Artificial Sequence: Synthetic polypeptide
GLTFAVYVRRKSIKKKRALRRFLETELVEPLTPSGTAPNQ

SEQ ID NO: 6124 - protein, 40 aa, Artificial Sequence
  Description of Artificial Sequence: Synthetic polypeptide
MTFAVYVRRKSIKKKRALRRFLETELVEPLTPSGTAPNQA

SEQ ID NO: 6125 - protein, 40 aa, Artificial Sequence
  Description of Artificial Sequence: Synthetic polypeptide
AVYVRRKSIKKKRALRRFLETELVEPLTPSGTAPNQAQLR

SEQ ID NO: 6126 - protein, 40 aa, Artificial Sequence
  Description of Artificial Sequence: Synthetic polypeptide
VYVRRKSIKKKRALRRFLETELVEPLTPSGTAPNQAQLRI

SEQ ID NO: 6127 - protein, 40 aa, Artificial Sequence
  Description of Artificial Sequence: Synthetic polypeptide
YVRRKSIKKKRALRRFLETELVEPLTPSGTAPNQAQLRIL

SEQ ID NO: 6128 - protein, 40 aa, Artificial Sequence
  Description of Artificial Sequence: Synthetic polypeptide
VRRKSIKKKRALRRFLETELVEPLTPSGTAPNQAQLRILK

SEQ ID NO: 6129 - protein, 40 aa, Artificial Sequence
  Description of Artificial Sequence: Synthetic polypeptide
RRKSIKKKRALRRFLETELVEPLTPSGTAPNQAQLRILKE

SEQ ID NO: 6130 - protein, 40 aa, Artificial Sequence
  Description of Artificial Sequence: Synthetic polypeptide
RKSIKKKRALRRFLETELVEPLTPSGTAPNQAQLRILKET

SEQ ID NO: 6131 - protein, 40 aa, Artificial Sequence
  Description of Artificial Sequence: Synthetic polypeptide
KSIKKKRALRRFLETELVEPLTPSGTAPNQAQLRILKETE

SEQ ID NO: 6132 - protein, 40 aa, Artificial Sequence
  Description of Artificial Sequence: Synthetic polypeptide
SIKKKRALRRFLETELVEPLTPSGTAPNQAQLRILKETEL

SEQ ID NO: 6133 - protein, 40 aa, Artificial Sequence
  Description of Artificial Sequence: Synthetic polypeptide
RFLETELVEPLTPSGTAPNQAQLRILKETELKRVKVLGSG

SEQ ID NO: 6134 - protein, 40 aa, Artificial Sequence
  Description of Artificial Sequence: Synthetic polypeptide
PLTPSGTAPNQAQLRILKETELKRVKVLGSGAFGTVYKGI

SEQ ID NO: 6135 - protein, 40 aa, Artificial Sequence
  Description of Artificial Sequence: Synthetic polypeptide
TPSGTAPNQAQLRILKETELKRVKVLGSGAFGTVYKGIWV

SEQ ID NO: 6136 - protein, 40 aa, Artificial Sequence
  Description of Artificial Sequence: Synthetic polypeptide
SGTAPNQAQLRILKETELKRVKVLGSGAFGTVYKGIWVPE

SEQ ID NO: 6137 - protein, 40 aa, Artificial Sequence
  Description of Artificial Sequence: Synthetic polypeptide
PNQAQLRILKETELKRVKVLGSGAFGTVYKGIWVPEGETV

SEQ ID NO: 6138 - protein, 40 aa, Artificial Sequence
  Description of Artificial Sequence: Synthetic polypeptide
AQLRILKETELKRVKVLGSGAFGTVYKGIWVPEGETVKIP

SEQ ID NO: 6139 - protein, 40 aa, Artificial Sequence
  Description of Artificial Sequence: Synthetic polypeptide
KETELKRVKVLGSGAFGTVYKGIWVPEGETVKIPVAIKIL

SEQ ID NO: 6140 - protein, 40 aa, Artificial Sequence
  Description of Artificial Sequence: Synthetic polypeptide
KRVKVLGSGAFGTVYKGIWVPEGETVKIPVAIKILNETTG

SEQ ID NO: 6141 - protein, 40 aa, Artificial Sequence
  Description of Artificial Sequence: Synthetic polypeptide
RVKVLGSGAFGTVYKGIWVPEGETVKIPVAIKILNETTGP

SEQ ID NO: 6142 - protein, 40 aa, Artificial Sequence
  Description of Artificial Sequence: Synthetic polypeptide
KVLGSGAFGTVYKGIWVPEGETVKIPVAIKILNETTGPKA

SEQ ID NO: 6143 - protein, 40 aa, Artificial Sequence
  Description of Artificial Sequence: Synthetic polypeptide
LGSGAFGTVYKGIWVPEGETVKIPVAIKILNETTGPKANV

SEQ ID NO: 6144 - protein, 40 aa, Artificial Sequence
  Description of Artificial Sequence: Synthetic polypeptide
GSGAFGTVYKGIWVPEGETVKIPVAIKILNETTGPKANVE

SEQ ID NO: 6145 - protein, 40 aa, Artificial Sequence
  Description of Artificial Sequence: Synthetic polypeptide
GAFGTVYKGIWVPEGETVKIPVAIKILNETTGPKANVEFM

SEQ ID NO: 6146 - protein, 40 aa, Artificial Sequence
  Description of Artificial Sequence: Synthetic polypeptide
AFGTVYKGIWVPEGETVKIPVAIKILNETTGPKANVEFMD

SEQ ID NO: 6147 - protein, 40 aa, Artificial Sequence
  Description of Artificial Sequence: Synthetic polypeptide
FGTVYKGIWVPEGETVKIPVAIKILNETTGPKANVEFMDE

SEQ ID NO: 6148 - protein, 40 aa, Artificial Sequence
  Description of Artificial Sequence: Synthetic polypeptide
GTVYKGIWVPEGETVKIPVAIKILNETTGPKANVEFMDEA

SEQ ID NO: 6149 - protein, 40 aa, Artificial Sequence
  Description of Artificial Sequence: Synthetic polypeptide
TVYKGIWVPEGETVKIPVAIKILNETTGPKANVEFMDEAL

SEQ ID NO: 6150 - protein, 40 aa, Artificial Sequence
  Description of Artificial Sequence: Synthetic polypeptide
IWVPEGETVKIPVAIKILNETTGPKANVEFMDEALIMASM

SEQ ID NO: 6151 - protein, 40 aa, Artificial Sequence
  Description of Artificial Sequence: Synthetic polypeptide
ETVKIPVAIKILNETTGPKANVEFMDEALIMASMDHPHLV

SEQ ID NO: 6152 - protein, 40 aa, Artificial Sequence
  Description of Artificial Sequence: Synthetic polypeptide
TVKIPVAIKILNETTGPKANVEFMDEALIMASMDHPHLVR

SEQ ID NO: 6153 - protein, 40 aa, Artificial Sequence
  Description of Artificial Sequence: Synthetic polypeptide
PVAIKILNETTGPKANVEFMDEALIMASMDHPHLVRLLGV

SEQ ID NO: 6154 - protein, 40 aa, Artificial Sequence
  Description of Artificial Sequence: Synthetic polypeptide
VAIKILNETTGPKANVEFMDEALIMASMDHPHLVRLLGVC

SEQ ID NO: 6155 - protein, 40 aa, Artificial Sequence
  Description of Artificial Sequence: Synthetic polypeptide
AIKILNETTGPKANVEFMDEALIMASMDHPHLVRLLGVCL

SEQ ID NO: 6156 - protein, 40 aa, Artificial Sequence
  Description of Artificial Sequence: Synthetic polypeptide
LNETTGPKANVEFMDEALIMASMDHPHLVRLLGVCLSPTI

SEQ ID NO: 6157 - protein, 40 aa, Artificial Sequence
  Description of Artificial Sequence: Synthetic polypeptide
KANVEFMDEALIMASMDHPHLVRLLGVCLSPTIQLVTQLM

SEQ ID NO: 6158 - protein, 40 aa, Artificial Sequence
  Description of Artificial Sequence: Synthetic polypeptide
ALIMASMDHPHLVRLLGVCLSPTIQLVTQLMPHGCLLEYV

SEQ ID NO: 6159 - protein, 40 aa, Artificial Sequence
  Description of Artificial Sequence: Synthetic polypeptide
RLLGVCLSPTIQLVTQLMPHGCLLEYVHEHKDNIGSQLLL

SEQ ID NO: 6160 - protein, 40 aa, Artificial Sequence
  Description of Artificial Sequence: Synthetic polypeptide
MGVCLSPTIQLVTQLMPHGCLLEYVHEHKDNIGSQLLLNW

SEQ ID NO: 6161 - protein, 40 aa, Artificial Sequence
  Description of Artificial Sequence: Synthetic polypeptide
PHGCLLEYVHEHKDNIGSQLLLNWCVQIAKGMMYLEERRL

SEQ ID NO: 6162 - protein, 40 aa, Artificial Sequence
  Description of Artificial Sequence: Synthetic polypeptide
MEYVHEHKDNIGSQLLLNWCVQIAKGMMYLEERRLVHRDL

SEQ ID NO: 6163 - protein, 40 aa, Artificial Sequence
  Description of Artificial Sequence: Synthetic polypeptide
RDLAARNVLVKSPNHVKITDFGLARLLEGDEKEYNADGGK

SEQ ID NO: 6164 - protein, 40 aa, Artificial Sequence
  Description of Artificial Sequence: Synthetic polypeptide
HVKITDFGLARLLEGDEKEYNADGGKMPIKWMALECIHYR

SEQ ID NO: 6165 - protein, 40 aa, Artificial Sequence
  Description of Artificial Sequence: Synthetic polypeptide
QSDVWSYGVTIWELMTFGGKPYDGIPTREIPDLLEKGERL

SEQ ID NO: 6166 - protein, 40 aa, Artificial Sequence
  Description of Artificial Sequence: Synthetic polypeptide
DVWSYGVTIWELMTFGGKPYDGIPTREIPDLLEKGERLPQ

SEQ ID NO: 6167 - protein, 40 aa, Artificial Sequence
  Description of Artificial Sequence: Synthetic polypeptide
GVTIWELMTFGGKPYDGIPTREIPDLLEKGERLPQPPICT

SEQ ID NO: 6168 - protein, 40 aa, Artificial Sequence
  Description of Artificial Sequence: Synthetic polypeptide
DLLEKGERLPQPPICTIDVYMVMVKCWMIDADSRPKFKEL

SEQ ID NO: 6169 - protein, 40 aa, Artificial Sequence
  Description of Artificial Sequence: Synthetic polypeptide
ERLPQPPICTIDVYMVMVKCWMIDADSRPKFKELAAEFSR

SEQ ID NO: 6170 - protein, 40 aa, Artificial Sequence
  Description of Artificial Sequence: Synthetic polypeptide
YMVMVKCWMIDADSRPKFKELAAEFSRMARDPQRYLVIQG

SEQ ID NO: 6171 - protein, 40 aa, Artificial Sequence
  Description of Artificial Sequence: Synthetic polypeptide
PKFKELAAEFSRMARDPQRYLVIQGDDRMKLPSPNDSKFF

SEQ ID NO: 6172 - protein, 40 aa, Artificial Sequence
  Description of Artificial Sequence: Synthetic polypeptide
DPQRYLVIQGDDRMKLPSPNDSKFFQNLLDEEDLEDMMDA

SEQ ID NO: 6173 - protein, 40 aa, Artificial Sequence
  Description of Artificial Sequence: Synthetic polypeptide
CCNGTLRKPVAPHVQEDSSTQRYSADPTVFAPERSPRGEL

SEQ ID NO: 6174 - protein, 40 aa, Artificial Sequence
  Description of Artificial Sequence: Synthetic polypeptide
PVAPHVQEDSSTQRYSADPTVFAPERSPRGELDEEGYMTP

SEQ ID NO: 6175 - protein, 40 aa, Artificial Sequence
  Description of Artificial Sequence: Synthetic polypeptide
VAPHVQEDSSTQRYSADPTVFAPERSPRGELDEEGYMTPM

SEQ ID NO: 6176 - protein, 40 aa, Artificial Sequence
  Description of Artificial Sequence: Synthetic polypeptide
APHVQEDSSTQRYSADPTVFAPERSPRGELDEEGYMTPMR

SEQ ID NO: 6177 - protein, 40 aa, Artificial Sequence
  Description of Artificial Sequence: Synthetic polypeptide
GYMTPMRDKPKQEYLNPVEENPFVSRRKNGDLQALDNPEY

SEQ ID NO: 6178 - protein, 40 aa, Artificial Sequence
  Description of Artificial Sequence: Synthetic polypeptide
PPKAEDEYVNEPLYLNTFANTLGKAEYLKNNILSMPEKAK

SEQ ID NO: 6179 - protein, 40 aa, Artificial Sequence
  Description of Artificial Sequence: Synthetic polypeptide
TLGKAEYLKNNILSMPEKAKKAFDNPDYWNHSLPPRSTLQ

SEQ ID NO: 6180 - protein, 40 aa, Artificial Sequence
  Description of Artificial Sequence: Synthetic polypeptide
KAEYLKNNILSMPEKAKKAFDNPDYWNHSLPPRSTLQHPD

SEQ ID NO: 6181 - protein, 40 aa, Artificial Sequence
  Description of Artificial Sequence: Synthetic polypeptide
QELLSVGSKRRRTGGSLRGNPSSSQVDEEQMNRVVEEEQQ

SEQ ID NO: 6182 - protein, 40 aa, Artificial Sequence
  Description of Artificial Sequence: Synthetic polypeptide
SVGSKRRRTGGSLRGNPSSSQVDEEQMNRVVEEEQQQQLR

SEQ ID NO: 6183 - protein, 40 aa, Artificial Sequence
  Description of Artificial Sequence: Synthetic polypeptide
GGSLRGNPSSSQVDEEQMNRVVEEEQQQQLRQQEEEHTAR

SEQ ID NO: 6184 - protein, 40 aa, Artificial Sequence
  Description of Artificial Sequence: Synthetic polypeptide
GSLRGNPSSSQVDEEQMNRVVEEEQQQQLRQQEEEHTARN

SEQ ID NO: 6185 - protein, 40 aa, Artificial Sequence
  Description of Artificial Sequence: Synthetic polypeptide
GNPSSSQVDEEQMNRVVEEEQQQQLRQQEEEHTARNGEVV

SEQ ID NO: 6186 - protein, 40 aa, Artificial Sequence
  Description of Artificial Sequence: Synthetic polypeptide
GEVVGVEPRPGGQNDSQQGQLEENNNRFISVDEDSSGNQE

SEQ ID NO: 6187 - protein, 40 aa, Artificial Sequence
  Description of Artificial Sequence: Synthetic polypeptide
VEPRPGGQNDSQQGQLEENNNRFISVDEDSSGNQEEQEED

SEQ ID NO: 6188 - protein, 40 aa, Artificial Sequence
  Description of Artificial Sequence: Synthetic polypeptide
SSIVDLPVHQLSSPFYTKTTKMKRKLDHGSEVRSFSLGKK

SEQ ID NO: 6189 - protein, 40 aa, Artificial Sequence
  Description of Artificial Sequence: Synthetic polypeptide
SIVDLPVHQLSSPFYTKTTKMKRKLDHGSEVRSFSLGKKP

SEQ ID NO: 6190 - protein, 40 aa, Artificial Sequence
  Description of Artificial Sequence: Synthetic polypeptide
VHQLSSPFYTKTTKMKRKLDHGSEVRSFSLGKKPCKVSEY

SEQ ID NO: 6191 - protein, 40 aa, Artificial Sequence
  Description of Artificial Sequence: Synthetic polypeptide
HQLSSPFYTKTTKMKRKLDHGSEVRSFSLGKKPCKVSEYT

SEQ ID NO: 6192 - protein, 40 aa, Artificial Sequence
  Description of Artificial Sequence: Synthetic polypeptide
TKTTKMKRKLDHGSEVRSFSLGKKPCKVSEYTSTTGLVPC

SEQ ID NO: 6193 - protein, 40 aa, Artificial Sequence
  Description of Artificial Sequence: Synthetic polypeptide
KTTKMKRKLDHGSEVRSFSLGKKPCKVSEYTSTTGLVPCS

SEQ ID NO: 6194 - protein, 40 aa, Artificial Sequence
  Description of Artificial Sequence: Synthetic polypeptide
TTKMKRKLDHGSEVRSFSLGKKPCKVSEYTSTTGLVPCSA

SEQ ID NO: 6195 - protein, 40 aa, Artificial Sequence
  Description of Artificial Sequence: Synthetic polypeptide
KMKRKLDHGSEVRSFSLGKKPCKVSEYTSTTGLVPCSATP

SEQ ID NO: 6196 - protein, 40 aa, Artificial Sequence
  Description of Artificial Sequence: Synthetic polypeptide
RKLDHGSEVRSFSLGKKPCKVSEYTSTTGLVPCSATPTTF

SEQ ID NO: 6197 - protein, 40 aa, Artificial Sequence
  Description of Artificial Sequence: Synthetic polypeptide
MDHGSEVRSFSLGKKPCKVSEYTSTTGLVPCSATPTTFGD

SEQ ID NO: 6198 - protein, 40 aa, Artificial Sequence
  Description of Artificial Sequence: Synthetic polypeptide
KKPCKVSEYTSTTGLVPCSATPTTFGDLRAANGQGQQRRR

SEQ ID NO: 6199 - protein, 40 aa, Artificial Sequence
  Description of Artificial Sequence: Synthetic polypeptide
VQPPTGLQEWLKMFQSWSGPEKLLALDELIDSCEPTQVKH

SEQ ID NO: 6200 - protein, 40 aa, Artificial Sequence
  Description of Artificial Sequence: Synthetic polypeptide
SGPEKLLALDELIDSCEPTQVKHMMQVIEPQFQRDFISLL

SEQ ID NO: 6201 - protein, 40 aa, Artificial Sequence
  Description of Artificial Sequence: Synthetic polypeptide
LIDSCEPTQVKHMMQVIEPQFQRDFISLLPKELALYVLSF

SEQ ID NO: 6202 - protein, 40 aa, Artificial Sequence
  Description of Artificial Sequence: Synthetic polypeptide
CRYWRILAEDNLLWREKCKEEGIDEPLHIKRRKVIKPGFI

SEQ ID NO: 6203 - protein, 40 aa, Artificial Sequence
  Description of Artificial Sequence: Synthetic polypeptide
YWRILAEDNLLWREKCKEEGIDEPLHIKRRKVIKPGFIHS

SEQ ID NO: 6204 - protein, 40 aa, Artificial Sequence
  Description of Artificial Sequence: Synthetic polypeptide
RILAEDNLLWREKCKEEGIDEPLHIKRRKVIKPGFIHSPW

SEQ ID NO: 6205 - protein, 40 aa, Artificial Sequence
  Description of Artificial Sequence: Synthetic polypeptide
ILAEDNLLWREKCKEEGIDEPLHIKRRKVIKPGFIHSPWK

SEQ ID NO: 6206 - protein, 40 aa, Artificial Sequence
  Description of Artificial Sequence: Synthetic polypeptide
LLWREKCKEEGIDEPLHIKRRKVIKPGFIHSPWKSAYIRQ

SEQ ID NO: 6207 - protein, 40 aa, Artificial Sequence
  Description of Artificial Sequence: Synthetic polypeptide
WREKCKEEGIDEPLHIKRRKVIKPGFIHSPWKSAYIRQHR

SEQ ID NO: 6208 - protein, 40 aa, Artificial Sequence
  Description of Artificial Sequence: Synthetic polypeptide
KCKEEGIDEPLHIKRRKVIKPGFIHSPWKSAYIRQHRIDT

SEQ ID NO: 6209 - protein, 40 aa, Artificial Sequence
  Description of Artificial Sequence: Synthetic polypeptide
PLHIKRRKVIKPGFIHSPWKSAYIRQHRIDTNWRRGELKS

SEQ ID NO: 6210 - protein, 40 aa, Artificial Sequence
  Description of Artificial Sequence: Synthetic polypeptide
RIDTNWRRGELKSPKVLKGHDDHVITCLQFCGNRIVSGSD

SEQ ID NO: 6211 - protein, 40 aa, Artificial Sequence
  Description of Artificial Sequence: Synthetic polypeptide
RRGELKSPKVLKGHDDHVITCLQFCGNRIVSGSDDNTLKV

SEQ ID NO: 6212 - protein, 40 aa, Artificial Sequence
  Description of Artificial Sequence: Synthetic polypeptide
GELKSPKVLKGHDDHVITCLQFCGNRIVSGSDDNTLKVWS

SEQ ID NO: 6213 - protein, 40 aa, Artificial Sequence
  Description of Artificial Sequence: Synthetic polypeptide
KSPKVLKGHDDHVITCLQFCGNRIVSGSDDNTLKVWSAVT

SEQ ID NO: 6214 - protein, 40 aa, Artificial Sequence
  Description of Artificial Sequence: Synthetic polypeptide
KVLKGHDDHVITCLQFCGNRIVSGSDDNTLKVWSAVTGKC

SEQ ID NO: 6215 - protein, 40 aa, Artificial Sequence
  Description of Artificial Sequence: Synthetic polypeptide
KGHDDHVITCLQFCGNRIVSGSDDNTLKVWSAVTGKCLRT

SEQ ID NO: 6216 - protein, 40 aa, Artificial Sequence
  Description of Artificial Sequence: Synthetic polypeptide
GHDDHVITCLQFCGNRIVSGSDDNTLKVWSAVTGKCLRTL

SEQ ID NO: 6217 - protein, 40 aa, Artificial Sequence
  Description of Artificial Sequence: Synthetic polypeptide
NRIVSGSDDNTLKVWSAVTGKCLRTLVGHTGGVWSSQMRD

SEQ ID NO: 6218 - protein, 40 aa, Artificial Sequence
  Description of Artificial Sequence: Synthetic polypeptide
RIVSGSDDNTLKVWSAVTGKCLRTLVGHTGGVWSSQMRDN

SEQ ID NO: 6219 - protein, 40 aa, Artificial Sequence
  Description of Artificial Sequence: Synthetic polypeptide
TLKVWSAVTGKCLRTLVGHTGGVWSSQMRDNIIISGSTDR

SEQ ID NO: 6220 - protein, 40 aa, Artificial Sequence
  Description of Artificial Sequence: Synthetic polypeptide
IISGSTDRTLKVWNAETGECIHTLYGHTSTVRCMHLHEKR

SEQ ID NO: 6221 - protein, 40 aa, Artificial Sequence
  Description of Artificial Sequence: Synthetic polypeptide
HTLYGHTSTVRCMHLHEKRVVSGSRDATLRVWDIETGQCL

SEQ ID NO: 6222 - protein, 40 aa, Artificial Sequence
  Description of Artificial Sequence: Synthetic polypeptide
YGHTSTVRCMHLHEKRVVSGSRDATLRVWDIETGQCLHVL

SEQ ID NO: 6223 - protein, 40 aa, Artificial Sequence
  Description of Artificial Sequence: Synthetic polypeptide
TSTVRCMHLHEKRVVSGSRDATLRVWDIETGQCLHVLMGH

SEQ ID NO: 6224 - protein, 40 aa, Artificial Sequence
  Description of Artificial Sequence: Synthetic polypeptide
TVRCMHLHEKRVVSGSRDATLRVWDIETGQCLHVLMGHVA

SEQ ID NO: 6225 - protein, 40 aa, Artificial Sequence
  Description of Artificial Sequence: Synthetic polypeptide
VRCMHLHEKRVVSGSRDATLRVWDIETGQCLHVLMGHVAA

SEQ ID NO: 6226 - protein, 40 aa, Artificial Sequence
  Description of Artificial Sequence: Synthetic polypeptide
GSRDATLRVWDIETGQCLHVLMGHVAAVRCVQYDGRRVVS

SEQ ID NO: 6227 - protein, 40 aa, Artificial Sequence
  Description of Artificial Sequence: Synthetic polypeptide
DIETGQCLHVLMGHVAAVRCVQYDGRRVVSGAYDFMVKVW

SEQ ID NO: 6228 - protein, 40 aa, Artificial Sequence
  Description of Artificial Sequence: Synthetic polypeptide
CLHVLMGHVAAVRCVQYDGRRVVSGAYDFMVKVWDPETET

SEQ ID NO: 6229 - protein, 40 aa, Artificial Sequence
  Description of Artificial Sequence: Synthetic polypeptide
LHVLMGHVAAVRCVQYDGRRVVSGAYDFMVKVWDPETETC

SEQ ID NO: 6230 - protein, 40 aa, Artificial Sequence
  Description of Artificial Sequence: Synthetic polypeptide
VAAVRCVQYDGRRVVSGAYDFMVKVWDPETETCLHTLQGH

SEQ ID NO: 6231 - protein, 40 aa, Artificial Sequence
  Description of Artificial Sequence: Synthetic polypeptide
QYDGRRVVSGAYDFMVKVWDPETETCLHTLQGHTNRVYSL

SEQ ID NO: 6232 - protein, 40 aa, Artificial Sequence
  Description of Artificial Sequence: Synthetic polypeptide
DGRRVVSGAYDFMVKVWDPETETCLHTLQGHTNRVYSLQF

SEQ ID NO: 6233 - protein, 40 aa, Artificial Sequence
  Description of Artificial Sequence: Synthetic polypeptide
GRRVVSGAYDFMVKVWDPETETCLHTLQGHTNRVYSLQFD

SEQ ID NO: 6234 - protein, 40 aa, Artificial Sequence
  Description of Artificial Sequence: Synthetic polypeptide
RRVVSGAYDFMVKVWDPETETCLHTLQGHTNRVYSLQFDG

SEQ ID NO: 6235 - protein, 40 aa, Artificial Sequence
  Description of Artificial Sequence: Synthetic polypeptide
RVVSGAYDFMVKVWDPETETCLHTLQGHTNRVYSLQFDGI

SEQ ID NO: 6236 - protein, 40 aa, Artificial Sequence
  Description of Artificial Sequence: Synthetic polypeptide
SGAYDFMVKVWDPETETCLHTLQGHTNRVYSLQFDGIHVV

SEQ ID NO: 6237 - protein, 40 aa, Artificial Sequence
  Description of Artificial Sequence: Synthetic polypeptide
GAYDFMVKVWDPETETCLHTLQGHTNRVYSLQFDGIHVVS

SEQ ID NO: 6238 - protein, 40 aa, Artificial Sequence
  Description of Artificial Sequence: Synthetic polypeptide
AYDFMVKVWDPETETCLHTLQGHTNRVYSLQFDGIHVVSG

SEQ ID NO: 6239 - protein, 40 aa, Artificial Sequence
  Description of Artificial Sequence: Synthetic polypeptide
FMVKVWDPETETCLHTLQGHTNRVYSLQFDGIHVVSGSLD

SEQ ID NO: 6240 - protein, 40 aa, Artificial Sequence
  Description of Artificial Sequence: Synthetic polypeptide
MVKVWDPETETCLHTLQGHTNRVYSLQFDGIHVVSGSLDT

SEQ ID NO: 6241 - protein, 40 aa, Artificial Sequence
  Description of Artificial Sequence: Synthetic polypeptide
VWDPETETCLHTLQGHTNRVYSLQFDGIHVVSGSLDTSIR

SEQ ID NO: 6242 - protein, 40 aa, Artificial Sequence
  Description of Artificial Sequence: Synthetic polypeptide
ETETCLHTLQGHTNRVYSLQFDGIHVVSGSLDTSIRVWDV

SEQ ID NO: 6243 - protein, 40 aa, Artificial Sequence
  Description of Artificial Sequence: Synthetic polypeptide
TLQGHTNRVYSLQFDGIHVVSGSLDTSIRVWDVETGNCIH

SEQ ID NO: 6244 - protein, 40 aa, Artificial Sequence
  Description of Artificial Sequence: Synthetic polypeptide
QGHTNRVYSLQFDGIHVVSGSLDTSIRVWDVETGNCIHTL

SEQ ID NO: 6245 - protein, 40 aa, Artificial Sequence
  Description of Artificial Sequence: Synthetic polypeptide
GHTNRVYSLQFDGIHVVSGSLDTSIRVWDVETGNCIHTLT

SEQ ID NO: 6246 - protein, 40 aa, Artificial Sequence
  Description of Artificial Sequence: Synthetic polypeptide
RVYSLQFDGIHVVSGSLDTSIRVWDVETGNCIHTLTGHQS

SEQ ID NO: 6247 - protein, 40 aa, Artificial Sequence
  Description of Artificial Sequence: Synthetic polypeptide
VYSLQFDGIHVVSGSLDTSIRVWDVETGNCIHTLTGHQSL

SEQ ID NO: 6248 - protein, 40 aa, Artificial Sequence
  Description of Artificial Sequence: Synthetic polypeptide
YSLQFDGIHVVSGSLDTSIRVWDVETGNCIHTLTGHQSLT

SEQ ID NO: 6249 - protein, 40 aa, Artificial Sequence
  Description of Artificial Sequence: Synthetic polypeptide
HTLTGHQSLTSGMELKDNILVSGNADSTVKIWDIKTGQCL

SEQ ID NO: 6250 - protein, 40 aa, Artificial Sequence
  Description of Artificial Sequence: Synthetic polypeptide
DNILVSGNADSTVKIWDIKTGQCLQTLQGPNKHQSAVTCL

SEQ ID NO: 6251 - protein, 40 aa, Artificial Sequence
  Description of Artificial Sequence: Synthetic polypeptide
QGPNKHQSAVTCLQFNKNFVITSSDDGTVKLWDLKTGEFI

SEQ ID NO: 6252 - protein, 40 aa, Artificial Sequence
  Description of Artificial Sequence: Synthetic polypeptide
RTVLIGEYLQIKGATPRDSGLYACTASRTVDSETWYFMVN

SEQ ID NO: 6253 - protein, 40 aa, Artificial Sequence
  Description of Artificial Sequence: Synthetic polypeptide
TVKFRCPAGGNPMPTMRWLKNGKEFKQEHRIGGYKVRNQH

SEQ ID NO: 6254 - protein, 40 aa, Artificial Sequence
  Description of Artificial Sequence: Synthetic polypeptide
VKFRCPAGGNPMPTMRWLKNGKEFKQEHRIGGYKVRNQHW

SEQ ID NO: 6255 - protein, 40 aa, Artificial Sequence
  Description of Artificial Sequence: Synthetic polypeptide
KFRCPAGGNPMPTMRWLKNGKEFKQEHRIGGYKVRNQHWS

SEQ ID NO: 6256 - protein, 40 aa, Artificial Sequence
  Description of Artificial Sequence: Synthetic polypeptide
FRCPAGGNPMPTMRWLKNGKEFKQEHRIGGYKVRNQHWSL

SEQ ID NO: 6257 - protein, 40 aa, Artificial Sequence
  Description of Artificial Sequence: Synthetic polypeptide
CPAGGNPMPTMRWLKNGKEFKQEHRIGGYKVRNQHWSLIM

SEQ ID NO: 6258 - protein, 40 aa, Artificial Sequence
  Description of Artificial Sequence: Synthetic polypeptide
NPMPTMRWLKNGKEFKQEHRIGGYKVRNQHWSLIMESVVP

SEQ ID NO: 6259 - protein, 40 aa, Artificial Sequence
  Description of Artificial Sequence: Synthetic polypeptide
MPTMRWLKNGKEFKQEHRIGGYKVRNQHWSLIMESVVPSD

SEQ ID NO: 6260 - protein, 40 aa, Artificial Sequence
  Description of Artificial Sequence: Synthetic polypeptide
MRWLKNGKEFKQEHRIGGYKVRNQHWSLIMESVVPSDKGN

SEQ ID NO: 6261 - protein, 40 aa, Artificial Sequence
  Description of Artificial Sequence: Synthetic polypeptide
KNGKEFKQEHRIGGYKVRNQHWSLIMESVVPSDKGNYTCV

SEQ ID NO: 6262 - protein, 40 aa, Artificial Sequence
  Description of Artificial Sequence: Synthetic polypeptide
KEFKQEHRIGGYKVRNQHWSLIMESVVPSDKGNYTCVVEN

SEQ ID NO: 6263 - protein, 40 aa, Artificial Sequence
  Description of Artificial Sequence: Synthetic polypeptide
FKQEHRIGGYKVRNQHWSLIMESVVPSDKGNYTCVVENEY

SEQ ID NO: 6264 - protein, 40 aa, Artificial Sequence
  Description of Artificial Sequence: Synthetic polypeptide
KQEHRIGGYKVRNQHWSLIMESVVPSDKGNYTCVVENEYG

SEQ ID NO: 6265 - protein, 40 aa, Artificial Sequence
  Description of Artificial Sequence: Synthetic polypeptide
QEHRIGGYKVRNQHWSLIMESVVPSDKGNYTCVVENEYGS

SEQ ID NO: 6266 - protein, 40 aa, Artificial Sequence
  Description of Artificial Sequence: Synthetic polypeptide
VRNQHWSLIMESVVPSDKGNYTCVVENEYGSINHTYHLDV

SEQ ID NO: 6267 - protein, 40 aa, Artificial Sequence
  Description of Artificial Sequence: Synthetic polypeptide
GPDGLPYLKVLKHSGINSSNAEVLALFNVTEADAGEYICK

SEQ ID NO: 6268 - protein, 40 aa, Artificial Sequence
  Description of Artificial Sequence: Synthetic polypeptide
DGLPYLKVLKHSGINSSNAEVLALFNVTEADAGEYICKVS

SEQ ID NO: 6269 - protein, 40 aa, Artificial Sequence
  Description of Artificial Sequence: Synthetic polypeptide
MPYLKVLKHSGINSSNAEVLALFNVTEADAGEYICKVSNY

SEQ ID NO: 6270 - protein, 40 aa, Artificial Sequence
  Description of Artificial Sequence: Synthetic polypeptide
HSGINSSNAEVLALFNVTEADAGEYICKVSNYIGQANQSA

SEQ ID NO: 6271 - protein, 40 aa, Artificial Sequence
  Description of Artificial Sequence: Synthetic polypeptide
GINSSNAEVLALFNVTEADAGEYICKVSNYIGQANQSAWL

SEQ ID NO: 6272 - protein, 40 aa, Artificial Sequence
  Description of Artificial Sequence: Synthetic polypeptide
VLALFNVTEADAGEYICKVSNYIGQANQSAWLTVLPKQQA

SEQ ID NO: 6273 - protein, 40 aa, Artificial Sequence
  Description of Artificial Sequence: Synthetic polypeptide
VTEADAGEYICKVSNYIGQANQSAWLTVLPKQQAPGREKE

SEQ ID NO: 6274 - protein, 40 aa, Artificial Sequence
  Description of Artificial Sequence: Synthetic polypeptide
EADAGEYICKVSNYIGQANQSAWLTVLPKQQAPGREKEIT

SEQ ID NO: 6275 - protein, 40 aa, Artificial Sequence
  Description of Artificial Sequence: Synthetic polypeptide
ADAGEYICKVSNYIGQANQSAWLTVLPKQQAPGREKEITA

SEQ ID NO: 6276 - protein, 40 aa, Artificial Sequence
  Description of Artificial Sequence: Synthetic polypeptide
DAGEYICKVSNYIGQANQSAWLTVLPKQQAPGREKEITAS

SEQ ID NO: 6277 - protein, 40 aa, Artificial Sequence
  Description of Artificial Sequence: Synthetic polypeptide
KVSNYIGQANQSAWLTVLPKQQAPGREKEITASPDYLEIA

SEQ ID NO: 6278 - protein, 40 aa, Artificial Sequence
  Description of Artificial Sequence: Synthetic polypeptide
VSNYIGQANQSAWLTVLPKQQAPGREKEITASPDYLEIAI

SEQ ID NO: 6279 - protein, 40 aa, Artificial Sequence
  Description of Artificial Sequence: Synthetic polypeptide
NYIGQANQSAWLTVLPKQQAPGREKEITASPDYLEIAIYC

SEQ ID NO: 6280 - protein, 40 aa, Artificial Sequence
  Description of Artificial Sequence: Synthetic polypeptide
YIGQANQSAWLTVLPKQQAPGREKEITASPDYLEIAIYCI

SEQ ID NO: 6281 - protein, 40 aa, Artificial Sequence
  Description of Artificial Sequence: Synthetic polypeptide
IGQANQSAWLTVLPKQQAPGREKEITASPDYLEIAIYCIG

SEQ ID NO: 6282 - protein, 40 aa, Artificial Sequence
  Description of Artificial Sequence: Synthetic polypeptide
ANQSAWLTVLPKQQAPGREKEITASPDYLEIAIYCIGVFL

SEQ ID NO: 6283 - protein, 40 aa, Artificial Sequence
  Description of Artificial Sequence: Synthetic polypeptide
NQSAWLTVLPKQQAPGREKEITASPDYLEIAIYCIGVFLI

SEQ ID NO: 6284 - protein, 40 aa, Artificial Sequence
  Description of Artificial Sequence: Synthetic polypeptide
QSAWLTVLPKQQAPGREKEITASPDYLEIAIYCIGVFLIA

SEQ ID NO: 6285 - protein, 40 aa, Artificial Sequence
  Description of Artificial Sequence: Synthetic polypeptide
SAWLTVLPKQQAPGREKEITASPDYLEIAIYCIGVFLIAC

SEQ ID NO: 6286 - protein, 40 aa, Artificial Sequence
  Description of Artificial Sequence: Synthetic polypeptide
WLTVLPKQQAPGREKEITASPDYLEIAIYCIGVFLIACMV

SEQ ID NO: 6287 - protein, 40 aa, Artificial Sequence
  Description of Artificial Sequence: Synthetic polypeptide
CIGVFLIACMVVTVILCRMKNTTKKPDFSSQPAVHKLTKR

SEQ ID NO: 6288 - protein, 40 aa, Artificial Sequence
  Description of Artificial Sequence: Synthetic polypeptide
CMVVTVILCRMKNTTKKPDFSSQPAVHKLTKRIPLRRQVT

SEQ ID NO: 6289 - protein, 40 aa, Artificial Sequence
  Description of Artificial Sequence: Synthetic polypeptide
TVILCRMKNTTKKPDFSSQPAVHKLTKRIPLRRQVTVSAE

SEQ ID NO: 6290 - protein, 40 aa, Artificial Sequence
  Description of Artificial Sequence: Synthetic polypeptide
VILCRMKNTTKKPDFSSQPAVHKLTKRIPLRRQVTVSAES

SEQ ID NO: 6291 - protein, 40 aa, Artificial Sequence
  Description of Artificial Sequence: Synthetic polypeptide
ILCRMKNTTKKPDFSSQPAVHKLTKRIPLRRQVTVSAESS

SEQ ID NO: 6292 - protein, 40 aa, Artificial Sequence
  Description of Artificial Sequence: Synthetic polypeptide
RMKNTTKKPDFSSQPAVHKLTKRIPLRRQVTVSAESSSSM

SEQ ID NO: 6293 - protein, 40 aa, Artificial Sequence
  Description of Artificial Sequence: Synthetic polypeptide
MKNTTKKPDFSSQPAVHKLTKRIPLRRQVTVSAESSSSMN

SEQ ID NO: 6294 - protein, 40 aa, Artificial Sequence
  Description of Artificial Sequence: Synthetic polypeptide
KNTTKKPDFSSQPAVHKLTKRIPLRRQVTVSAESSSSMNS

SEQ ID NO: 6295 - protein, 40 aa, Artificial Sequence
  Description of Artificial Sequence: Synthetic polypeptide
NTTKKPDFSSQPAVHKLTKRIPLRRQVTVSAESSSSMNSN

SEQ ID NO: 6296 - protein, 40 aa, Artificial Sequence
  Description of Artificial Sequence: Synthetic polypeptide
KKPDFSSQPAVHKLTKRIPLRRQVTVSAESSSSMNSNTPL

SEQ ID NO: 6297 - protein, 40 aa, Artificial Sequence
  Description of Artificial Sequence: Synthetic polypeptide
SSQPAVHKLTKRIPLRRQVTVSAESSSSMNSNTPLVRITT

SEQ ID NO: 6298 - protein, 40 aa, Artificial Sequence
  Description of Artificial Sequence: Synthetic polypeptide
PKEAVTVAVKMLKDDATEKDLSDLVSEMEMMKMIGKHKNI

SEQ ID NO: 6299 - protein, 40 aa, Artificial Sequence
  Description of Artificial Sequence: Synthetic polypeptide
KEAVTVAVKMLKDDATEKDLSDLVSEMEMMKMIGKHKNII

SEQ ID NO: 6300 - protein, 40 aa, Artificial Sequence
  Description of Artificial Sequence: Synthetic polypeptide
AVKMLKDDATEKDLSDLVSEMEMMKMIGKHKNIINLLGAC

SEQ ID NO: 6301 - protein, 40 aa, Artificial Sequence
  Description of Artificial Sequence: Synthetic polypeptide
VKMLKDDATEKDLSDLVSEMEMMKMIGKHKNIINLLGACT

SEQ ID NO: 6302 - protein, 40 aa, Artificial Sequence
  Description of Artificial Sequence: Synthetic polypeptide
MEMMKMIGKHKNIINLLGACTQDGPLYVIVEYASKGNLRE

SEQ ID NO: 6303 - protein, 40 aa, Artificial Sequence
  Description of Artificial Sequence: Synthetic polypeptide
EMMKMIGKHKNIINLLGACTQDGPLYVIVEYASKGNLREY

SEQ ID NO: 6304 - protein, 40 aa, Artificial Sequence
  Description of Artificial Sequence: Synthetic polypeptide
KHKNIINLLGACTQDGPLYVIVEYASKGNLREYLRARRPP

SEQ ID NO: 6305 - protein, 40 aa, Artificial Sequence
  Description of Artificial Sequence: Synthetic polypeptide
ARGMEYLASQKCIHRDLAARNVLVTENNVMKIADFGLARD

SEQ ID NO: 6306 - protein, 40 aa, Artificial Sequence
  Description of Artificial Sequence: Synthetic polypeptide
RGMEYLASQKCIHRDLAARNVLVTENNVMKIADFGLARDI

SEQ ID NO: 6307 - protein, 40 aa, Artificial Sequence
  Description of Artificial Sequence: Synthetic polypeptide
ASQKCIHRDLAARNVLVTENNVMKIADFGLARDINNIDYY

SEQ ID NO: 6308 - protein, 40 aa, Artificial Sequence
  Description of Artificial Sequence: Synthetic polypeptide
KCIHRDLAARNVLVTENNVMKIADFGLARDINNIDYYKKT

SEQ ID NO: 6309 - protein, 40 aa, Artificial Sequence
  Description of Artificial Sequence: Synthetic polypeptide
MFDRVYTHQSDVWSFGVLMWEIFTLGGSPYPGIPVEELFK

SEQ ID NO: 6310 - protein, 40 aa, Artificial Sequence
  Description of Artificial Sequence: Synthetic polypeptide
TLGGSPYPGIPVEELFKLLKEGHRMDKPANCTNELYMMMR

SEQ ID NO: 6311 - protein, 40 aa, Artificial Sequence
  Description of Artificial Sequence: Synthetic polypeptide
MGAPACALALCVAVAIVAGASSESLGTEQRVVGRAAEVPG

SEQ ID NO: 6312 - protein, 40 aa, Artificial Sequence
  Description of Artificial Sequence: Synthetic polypeptide
GGPMGPTVWVKDGTGLVPSERVLVGPQRLQVLNASHEDSG

SEQ ID NO: 6313 - protein, 40 aa, Artificial Sequence
  Description of Artificial Sequence: Synthetic polypeptide
PSERVLVGPQRLQVLNASHEDSGAYSCRQRLTQRVLCHFS

SEQ ID NO: 6314 - protein, 40 aa, Artificial Sequence
  Description of Artificial Sequence: Synthetic polypeptide
MVGPQRLQVLNASHEDSGAYSCRQRLTQRVLCHFSVRVTD

SEQ ID NO: 6315 - protein, 40 aa, Artificial Sequence
  Description of Artificial Sequence: Synthetic polypeptide
TRPERMDKKLLAVPAANTVRFRCPAAGNPTPSISWLKNGR

SEQ ID NO: 6316 - protein, 40 aa, Artificial Sequence
  Description of Artificial Sequence: Synthetic polypeptide
TLDVLERSPHRPILQAGLPANQTAVLGSDVEFHCKVYSDA

SEQ ID NO: 6317 - protein, 40 aa, Artificial Sequence
  Description of Artificial Sequence: Synthetic polypeptide
LKHVEVNGSKVGPDGTPYVTVLKTAGANTTDKELEVLSLH

SEQ ID NO: 6318 - protein, 40 aa, Artificial Sequence
  Description of Artificial Sequence: Synthetic polypeptide
PADPKWELSRARLTLGKPLGEGCFGQVVMAEAIGIDKDRA

SEQ ID NO: 6319 - protein, 40 aa, Artificial Sequence
  Description of Artificial Sequence: Synthetic polypeptide
AIGIDKDRAAKPVTVAVKMLKDDATDKDLSDLVSEMEMMK

SEQ ID NO: 6320 - protein, 40 aa, Artificial Sequence
  Description of Artificial Sequence: Synthetic polypeptide
MSDLVSEMEMMKMIGKHKNIINLLGACTQGGPLYVLVEYA

SEQ ID NO: 6321 - protein, 40 aa, Artificial Sequence
  Description of Artificial Sequence: Synthetic polypeptide
NIINLLGACTQGGPLYVLVEYAAKGNLREFLRARRPPGLD

SEQ ID NO: 6322 - protein, 40 aa, Artificial Sequence
  Description of Artificial Sequence: Synthetic polypeptide
ACTQGGPLYVLVEYAAKGNLREFLRARRPPGLDYSFDTCK

SEQ ID NO: 6323 - protein, 40 aa, Artificial Sequence
  Description of Artificial Sequence: Synthetic polypeptide
QKCIHRDLAARNVLVTEDNVMKIADFGLARDVHNLDYYKK

SEQ ID NO: 6324 - protein, 40 aa, Artificial Sequence
  Description of Artificial Sequence: Synthetic polypeptide
MPALARDGGQLPLLVVFSAMIFGTITNQDLPVIKCVLINH

SEQ ID NO: 6325 - protein, 40 aa, Artificial Sequence
  Description of Artificial Sequence: Synthetic polypeptide
PALARDGGQLPLLVVFSAMIFGTITNQDLPVIKCVLINHK

SEQ ID NO: 6326 - protein, 40 aa, Artificial Sequence
  Description of Artificial Sequence: Synthetic polypeptide
ALARDGGQLPLLVVFSAMIFGTITNQDLPVIKCVLINHKN

SEQ ID NO: 6327 - protein, 40 aa, Artificial Sequence
  Description of Artificial Sequence: Synthetic polypeptide
MARDGGQLPLLVVFSAMIFGTITNQDLPVIKCVLINHKNN

SEQ ID NO: 6328 - protein, 40 aa, Artificial Sequence
  Description of Artificial Sequence: Synthetic polypeptide
QVLVDAPGNISCLWVFKHSSLNCQPHFDLQNRGVVSMVIL

SEQ ID NO: 6329 - protein, 40 aa, Artificial Sequence
  Description of Artificial Sequence: Synthetic polypeptide
VLVDAPGNISCLWVFKHSSLNCQPHFDLQNRGVVSMVILK

SEQ ID NO: 6330 - protein, 40 aa, Artificial Sequence
  Description of Artificial Sequence: Synthetic polypeptide
HFDLQNRGVVSMVILKMTETQAGEYLLFIQSEATNYTILF

SEQ ID NO: 6331 - protein, 40 aa, Artificial Sequence
  Description of Artificial Sequence: Synthetic polypeptide
DLQNRGVVSMVILKMTETQAGEYLLFIQSEATNYTILFTV

SEQ ID NO: 6332 - protein, 40 aa, Artificial Sequence
  Description of Artificial Sequence: Synthetic polypeptide
QNRGVVSMVILKMTETQAGEYLLFIQSEATNYTILFTVSI

SEQ ID NO: 6333 - protein, 40 aa, Artificial Sequence
  Description of Artificial Sequence: Synthetic polypeptide
GVVSMVILKMTETQAGEYLLFIQSEATNYTILFTVSIRNT

SEQ ID NO: 6334 - protein, 40 aa, Artificial Sequence
  Description of Artificial Sequence: Synthetic polypeptide
VVSMVILKMTETQAGEYLLFIQSEATNYTILFTVSIRNTL

SEQ ID NO: 6335 - protein, 40 aa, Artificial Sequence
  Description of Artificial Sequence: Synthetic polypeptide
VSMVILKMTETQAGEYLLFIQSEATNYTILFTVSIRNTLL

SEQ ID NO: 6336 - protein, 40 aa, Artificial Sequence
  Description of Artificial Sequence: Synthetic polypeptide
SMVILKMTETQAGEYLLFIQSEATNYTILFTVSIRNTLLY

SEQ ID NO: 6337 - protein, 40 aa, Artificial Sequence
  Description of Artificial Sequence: Synthetic polypeptide
MKMTETQAGEYLLFIQSEATNYTILFTVSIRNTLLYTLRR

SEQ ID NO: 6338 - protein, 40 aa, Artificial Sequence
  Description of Artificial Sequence: Synthetic polypeptide
AGEYLLFIQSEATNYTILFTVSIRNTLLYTLRRPYFRKME

SEQ ID NO: 6339 - protein, 40 aa, Artificial Sequence
  Description of Artificial Sequence: Synthetic polypeptide
MLYTLRRPYFRKMENQDALVCISESVPEPIVEWVLCDSQG

SEQ ID NO: 6340 - protein, 40 aa, Artificial Sequence
  Description of Artificial Sequence: Synthetic polypeptide
YTLRRPYFRKMENQDALVCISESVPEPIVEWVLCDSQGES

SEQ ID NO: 6341 - protein, 40 aa, Artificial Sequence
  Description of Artificial Sequence: Synthetic polypeptide
LRRPYFRKMENQDALVCISESVPEPIVEWVLCDSQGESCK

SEQ ID NO: 6342 - protein, 40 aa, Artificial Sequence
  Description of Artificial Sequence: Synthetic polypeptide
RRPYFRKMENQDALVCISESVPEPIVEWVLCDSQGESCKE

SEQ ID NO: 6343 - protein, 40 aa, Artificial Sequence
  Description of Artificial Sequence: Synthetic polypeptide
RPYFRKMENQDALVCISESVPEPIVEWVLCDSQGESCKEE

SEQ ID NO: 6344 - protein, 40 aa, Artificial Sequence
  Description of Artificial Sequence: Synthetic polypeptide
PYFRKMENQDALVCISESVPEPIVEWVLCDSQGESCKEES

SEQ ID NO: 6345 - protein, 40 aa, Artificial Sequence
  Description of Artificial Sequence: Synthetic polypeptide
NQDALVCISESVPEPIVEWVLCDSQGESCKEESPAVVKKE

SEQ ID NO: 6346 - protein, 40 aa, Artificial Sequence
  Description of Artificial Sequence: Synthetic polypeptide
MVCISESVPEPIVEWVLCDSQGESCKEESPAVVKKEEKVL

SEQ ID NO: 6347 - protein, 40 aa, Artificial Sequence
  Description of Artificial Sequence: Synthetic polypeptide
ISESVPEPIVEWVLCDSQGESCKEESPAVVKKEEKVLHEL

SEQ ID NO: 6348 - protein, 40 aa, Artificial Sequence
  Description of Artificial Sequence: Synthetic polypeptide
ESVPEPIVEWVLCDSQGESCKEESPAVVKKEEKVLHELFG

SEQ ID NO: 6349 - protein, 40 aa, Artificial Sequence
  Description of Artificial Sequence: Synthetic polypeptide
ECTRLFTIDLNQTPQTTLPQLFLKVGEPLWIRCKAVHVNH

SEQ ID NO: 6350 - protein, 40 aa, Artificial Sequence
  Description of Artificial Sequence: Synthetic polypeptide
PQTTLPQLFLKVGEPLWIRCKAVHVNHGFGLTWELENKAL

SEQ ID NO: 6351 - protein, 40 aa, Artificial Sequence
  Description of Artificial Sequence: Synthetic polypeptide
QLFLKVGEPLWIRCKAVHVNHGFGLTWELENKALEEGNYF

SEQ ID NO: 6352 - protein, 40 aa, Artificial Sequence
  Description of Artificial Sequence: Synthetic polypeptide
FLKVGEPLWIRCKAVHVNHGFGLTWELENKALEEGNYFEM

SEQ ID NO: 6353 - protein, 40 aa, Artificial Sequence
  Description of Artificial Sequence: Synthetic polypeptide
LKVGEPLWIRCKAVHVNHGFGLTWELENKALEEGNYFEMS

SEQ ID NO: 6354 - protein, 40 aa, Artificial Sequence
  Description of Artificial Sequence: Synthetic polypeptide
LWIRCKAVHVNHGFGLTWELENKALEEGNYFEMSTYSTNR

SEQ ID NO: 6355 - protein, 40 aa, Artificial Sequence
  Description of Artificial Sequence: Synthetic polypeptide
CKAVHVNHGFGLTWELENKALEEGNYFEMSTYSTNRTMIR

SEQ ID NO: 6356 - protein, 40 aa, Artificial Sequence
  Description of Artificial Sequence: Synthetic polypeptide
NSSEDYEIDQYEEFCFSVRFKAYPQIRCTWTFSRKSFPCE

SEQ ID NO: 6357 - protein, 40 aa, Artificial Sequence
  Description of Artificial Sequence: Synthetic polypeptide
DYEIDQYEEFCFSVRFKAYPQIRCTWTFSRKSFPCEQKGL

SEQ ID NO: 6358 - protein, 40 aa, Artificial Sequence
  Description of Artificial Sequence: Synthetic polypeptide
YEIDQYEEFCFSVRFKAYPQIRCTWTFSRKSFPCEQKGLD

SEQ ID NO: 6359 - protein, 40 aa, Artificial Sequence
  Description of Artificial Sequence: Synthetic polypeptide
EIDQYEEFCFSVRFKAYPQIRCTWTFSRKSFPCEQKGLDN

SEQ ID NO: 6360 - protein, 40 aa, Artificial Sequence
  Description of Artificial Sequence: Synthetic polypeptide
EFCFSVRFKAYPQIRCTWTFSRKSFPCEQKGLDNGYSISK

SEQ ID NO: 6361 - protein, 40 aa, Artificial Sequence
  Description of Artificial Sequence: Synthetic polypeptide
CFSVRFKAYPQIRCTWTFSRKSFPCEQKGLDNGYSISKFC

SEQ ID NO: 6362 - protein, 40 aa, Artificial Sequence
  Description of Artificial Sequence: Synthetic polypeptide
SVRFKAYPQIRCTWTFSRKSFPCEQKGLDNGYSISKFCNH

SEQ ID NO: 6363 - protein, 40 aa, Artificial Sequence
  Description of Artificial Sequence: Synthetic polypeptide
QIRCTWTFSRKSFPCEQKGLDNGYSISKFCNHKHQPGEYI

SEQ ID NO: 6364 - protein, 40 aa, Artificial Sequence
  Description of Artificial Sequence: Synthetic polypeptide
RCTWTFSRKSFPCEQKGLDNGYSISKFCNHKHQPGEYIFH

SEQ ID NO: 6365 - protein, 40 aa, Artificial Sequence
  Description of Artificial Sequence: Synthetic polypeptide
TWTFSRKSFPCEQKGLDNGYSISKFCNHKHQPGEYIFHAE

SEQ ID NO: 6366 - protein, 40 aa, Artificial Sequence
  Description of Artificial Sequence: Synthetic polypeptide
NHKHQPGEYIFHAENDDAQFTKMFTLNIRRKPQVLAEASA

SEQ ID NO: 6367 - protein, 40 aa, Artificial Sequence
  Description of Artificial Sequence: Synthetic polypeptide
PGEYIFHAENDDAQFTKMFTLNIRRKPQVLAEASASQASC

SEQ ID NO: 6368 - protein, 40 aa, Artificial Sequence
  Description of Artificial Sequence: Synthetic polypeptide
GEYIFHAENDDAQFTKMFTLNIRRKPQVLAEASASQASCF

SEQ ID NO: 6369 - protein, 40 aa, Artificial Sequence
  Description of Artificial Sequence: Synthetic polypeptide
EYIFHAENDDAQFTKMFTLNIRRKPQVLAEASASQASCFS

SEQ ID NO: 6370 - protein, 40 aa, Artificial Sequence
  Description of Artificial Sequence: Synthetic polypeptide
EASASQASCFSDGYPLPSWTWKKCSDKSPNCTEEITEGVW

SEQ ID NO: 6371 - protein, 40 aa, Artificial Sequence
  Description of Artificial Sequence: Synthetic polypeptide
CFSDGYPLPSWTWKKCSDKSPNCTEEITEGVWNRKANRKV

SEQ ID NO: 6372 - protein, 40 aa, Artificial Sequence
  Description of Artificial Sequence: Synthetic polypeptide
DGYPLPSWTWKKCSDKSPNCTEEITEGVWNRKANRKVFGQ

SEQ ID NO: 6373 - protein, 40 aa, Artificial Sequence
  Description of Artificial Sequence: Synthetic polypeptide
GYPLPSWTWKKCSDKSPNCTEEITEGVWNRKANRKVFGQW

SEQ ID NO: 6374 - protein, 40 aa, Artificial Sequence
  Description of Artificial Sequence: Synthetic polypeptide
WTWKKCSDKSPNCTEEITEGVWNRKANRKVFGQWVSSSTL

SEQ ID NO: 6375 - protein, 40 aa, Artificial Sequence
  Description of Artificial Sequence: Synthetic polypeptide
RKANRKVFGQWVSSSTLNMSEAIKGFLVKCCAYNSLGTSC

SEQ ID NO: 6376 - protein, 40 aa, Artificial Sequence
  Description of Artificial Sequence: Synthetic polypeptide
SSTLNMSEAIKGFLVKCCAYNSLGTSCETILLNSPGPFPF

SEQ ID NO: 6377 - protein, 40 aa, Artificial Sequence
  Description of Artificial Sequence: Synthetic polypeptide
STLNMSEAIKGFLVKCCAYNSLGTSCETILLNSPGPFPFI

SEQ ID NO: 6378 - protein, 40 aa, Artificial Sequence
  Description of Artificial Sequence: Synthetic polypeptide
TLNMSEAIKGFLVKCCAYNSLGTSCETILLNSPGPFPFIQ

SEQ ID NO: 6379 - protein, 40 aa, Artificial Sequence
  Description of Artificial Sequence: Synthetic polypeptide
LNMSEAIKGFLVKCCAYNSLGTSCETILLNSPGPFPFIQD

SEQ ID NO: 6380 - protein, 40 aa, Artificial Sequence
  Description of Artificial Sequence: Synthetic polypeptide
NMSEAIKGFLVKCCAYNSLGTSCETILLNSPGPFPFIQDN

SEQ ID NO: 6381 - protein, 40 aa, Artificial Sequence
  Description of Artificial Sequence: Synthetic polypeptide
MVKCCAYNSLGTSCETILLNSPGPFPFIQDNISFYATIGV

SEQ ID NO: 6382 - protein, 40 aa, Artificial Sequence
  Description of Artificial Sequence: Synthetic polypeptide
VKCCAYNSLGTSCETILLNSPGPFPFIQDNISFYATIGVC

SEQ ID NO: 6383 - protein, 40 aa, Artificial Sequence
  Description of Artificial Sequence: Synthetic polypeptide
CAYNSLGTSCETILLNSPGPFPFIQDNISFYATIGVCLLF

SEQ ID NO: 6384 - protein, 40 aa, Artificial Sequence
  Description of Artificial Sequence: Synthetic polypeptide
YNSLGTSCETILLNSPGPFPFIQDNISFYATIGVCLLFIV

SEQ ID NO: 6385 - protein, 40 aa, Artificial Sequence
  Description of Artificial Sequence: Synthetic polypeptide
SLGTSCETILLNSPGPFPFIQDNISFYATIGVCLLFIVVL

SEQ ID NO: 6386 - protein, 40 aa, Artificial Sequence
  Description of Artificial Sequence: Synthetic polypeptide
LGTSCETILLNSPGPFPFIQDNISFYATIGVCLLFIVVLT

SEQ ID NO: 6387 - protein, 40 aa, Artificial Sequence
  Description of Artificial Sequence: Synthetic polypeptide
GTSCETILLNSPGPFPFIQDNISFYATIGVCLLFIVVLTL

SEQ ID NO: 6388 - protein, 40 aa, Artificial Sequence
  Description of Artificial Sequence: Synthetic polypeptide
TSCETILLNSPGPFPFIQDNISFYATIGVCLLFIVVLTLL

SEQ ID NO: 6389 - protein, 40 aa, Artificial Sequence
  Description of Artificial Sequence: Synthetic polypeptide
SCETILLNSPGPFPFIQDNISFYATIGVCLLFIVVLTLLI

SEQ ID NO: 6390 - protein, 40 aa, Artificial Sequence
  Description of Artificial Sequence: Synthetic polypeptide
CETILLNSPGPFPFIQDNISFYATIGVCLLFIVVLTLLIC

SEQ ID NO: 6391 - protein, 40 aa, Artificial Sequence
  Description of Artificial Sequence: Synthetic polypeptide
ETILLNSPGPFPFIQDNISFYATIGVCLLFIVVLTLLICH

SEQ ID NO: 6392 - protein, 40 aa, Artificial Sequence
  Description of Artificial Sequence: Synthetic polypeptide
TILLNSPGPFPFIQDNISFYATIGVCLLFIVVLTLLICHK

SEQ ID NO: 6393 - protein, 40 aa, Artificial Sequence
  Description of Artificial Sequence: Synthetic polypeptide
ILLNSPGPFPFIQDNISFYATIGVCLLFIVVLTLLICHKY

SEQ ID NO: 6394 - protein, 40 aa, Artificial Sequence
  Description of Artificial Sequence: Synthetic polypeptide
LLNSPGPFPFIQDNISFYATIGVCLLFIVVLTLLICHKYK

SEQ ID NO: 6395 - protein, 40 aa, Artificial Sequence
  Description of Artificial Sequence: Synthetic polypeptide
SPGPFPFIQDNISFYATIGVCLLFIVVLTLLICHKYKKQF

SEQ ID NO: 6396 - protein, 40 aa, Artificial Sequence
  Description of Artificial Sequence: Synthetic polypeptide
GPFPFIQDNISFYATIGVCLLFIVVLTLLICHKYKKQFRY

SEQ ID NO: 6397 - protein, 40 aa, Artificial Sequence
  Description of Artificial Sequence: Synthetic polypeptide
PFIQDNISFYATIGVCLLFIVVLTLLICHKYKKQFRYESQ

SEQ ID NO: 6398 - protein, 40 aa, Artificial Sequence
  Description of Artificial Sequence: Synthetic polypeptide
QDNISFYATIGVCLLFIVVLTLLICHKYKKQFRYESQLQM

SEQ ID NO: 6399 - protein, 40 aa, Artificial Sequence
  Description of Artificial Sequence: Synthetic polypeptide
ISFYATIGVCLLFIVVLTLLICHKYKKQFRYESQLQMVQV

SEQ ID NO: 6400 - protein, 40 aa, Artificial Sequence
  Description of Artificial Sequence: Synthetic polypeptide
SFYATIGVCLLFIVVLTLLICHKYKKQFRYESQLQMVQVT

SEQ ID NO: 6401 - protein, 40 aa, Artificial Sequence
  Description of Artificial Sequence: Synthetic polypeptide
ATIGVCLLFIVVLTLLICHKYKKQFRYESQLQMVQVTGSS

SEQ ID NO: 6402 - protein, 40 aa, Artificial Sequence
  Description of Artificial Sequence: Synthetic polypeptide
TIGVCLLFIVVLTLLICHKYKKQFRYESQLQMVQVTGSSD

SEQ ID NO: 6403 - protein, 40 aa, Artificial Sequence
  Description of Artificial Sequence: Synthetic polypeptide
IGVCLLFIVVLTLLICHKYKKQFRYESQLQMVQVTGSSDN

SEQ ID NO: 6404 - protein, 40 aa, Artificial Sequence
  Description of Artificial Sequence: Synthetic polypeptide
GVCLLFIVVLTLLICHKYKKQFRYESQLQMVQVTGSSDNE

SEQ ID NO: 6405 - protein, 40 aa, Artificial Sequence
  Description of Artificial Sequence: Synthetic polypeptide
CLLFIVVLTLLICHKYKKQFRYESQLQMVQVTGSSDNEYF

SEQ ID NO: 6406 - protein, 40 aa, Artificial Sequence
  Description of Artificial Sequence: Synthetic polypeptide
LLFIVVLTLLICHKYKKQFRYESQLQMVQVTGSSDNEYFY

SEQ ID NO: 6407 - protein, 40 aa, Artificial Sequence
  Description of Artificial Sequence: Synthetic polypeptide
LFIVVLTLLICHKYKKQFRYESQLQMVQVTGSSDNEYFYV

SEQ ID NO: 6408 - protein, 40 aa, Artificial Sequence
  Description of Artificial Sequence: Synthetic polypeptide
FIVVLTLLICHKYKKQFRYESQLQMVQVTGSSDNEYFYVD

SEQ ID NO: 6409 - protein, 40 aa, Artificial Sequence
  Description of Artificial Sequence: Synthetic polypeptide
IVVLTLLICHKYKKQFRYESQLQMVQVTGSSDNEYFYVDF

SEQ ID NO: 6410 - protein, 40 aa, Artificial Sequence
  Description of Artificial Sequence: Synthetic polypeptide
VVLTLLICHKYKKQFRYESQLQMVQVTGSSDNEYFYVDFR

SEQ ID NO: 6411 - protein, 40 aa, Artificial Sequence
  Description of Artificial Sequence: Synthetic polypeptide
VLTLLICHKYKKQFRYESQLQMVQVTGSSDNEYFYVDFRE

SEQ ID NO: 6412 - protein, 40 aa, Artificial Sequence
  Description of Artificial Sequence: Synthetic polypeptide
LICHKYKKQFRYESQLQMVQVTGSSDNEYFYVDFREYEYD

SEQ ID NO: 6413 - protein, 40 aa, Artificial Sequence
  Description of Artificial Sequence: Synthetic polypeptide
HKYKKQFRYESQLQMVQVTGSSDNEYFYVDFREYEYDLKW

SEQ ID NO: 6414 - protein, 40 aa, Artificial Sequence
  Description of Artificial Sequence: Synthetic polypeptide
YKKQFRYESQLQMVQVTGSSDNEYFYVDFREYEYDLKWEF

SEQ ID NO: 6415 - protein, 40 aa, Artificial Sequence
  Description of Artificial Sequence: Synthetic polypeptide
FRYESQLQMVQVTGSSDNEYFYVDFREYEYDLKWEFPREN

SEQ ID NO: 6416 - protein, 40 aa, Artificial Sequence
  Description of Artificial Sequence: Synthetic polypeptide
RYESQLQMVQVTGSSDNEYFYVDFREYEYDLKWEFPRENL

SEQ ID NO: 6417 - protein, 40 aa, Artificial Sequence
  Description of Artificial Sequence: Synthetic polypeptide
YESQLQMVQVTGSSDNEYFYVDFREYEYDLKWEFPRENLE

SEQ ID NO: 6418 - protein, 40 aa, Artificial Sequence
  Description of Artificial Sequence: Synthetic polypeptide
ESQLQMVQVTGSSDNEYFYVDFREYEYDLKWEFPRENLEF

SEQ ID NO: 6419 - protein, 40 aa, Artificial Sequence
  Description of Artificial Sequence: Synthetic polypeptide
SQLQMVQVTGSSDNEYFYVDFREYEYDLKWEFPRENLEFG

SEQ ID NO: 6420 - protein, 40 aa, Artificial Sequence
  Description of Artificial Sequence: Synthetic polypeptide
QLQMVQVTGSSDNEYFYVDFREYEYDLKWEFPRENLEFGK

SEQ ID NO: 6421 - protein, 40 aa, Artificial Sequence
  Description of Artificial Sequence: Synthetic polypeptide
MVQVTGSSDNEYFYVDFREYEYDLKWEFPRENLEFGKVLG

SEQ ID NO: 6422 - protein, 40 aa, Artificial Sequence
  Description of Artificial Sequence: Synthetic polypeptide
VQVTGSSDNEYFYVDFREYEYDLKWEFPRENLEFGKVLGS

SEQ ID NO: 6423 - protein, 40 aa, Artificial Sequence
  Description of Artificial Sequence: Synthetic polypeptide
VTGSSDNEYFYVDFREYEYDLKWEFPRENLEFGKVLGSGA

SEQ ID NO: 6424 - protein, 40 aa, Artificial Sequence
  Description of Artificial Sequence: Synthetic polypeptide
TGSSDNEYFYVDFREYEYDLKWEFPRENLEFGKVLGSGAF

SEQ ID NO: 6425 - protein, 40 aa, Artificial Sequence
  Description of Artificial Sequence: Synthetic polypeptide
GSSDNEYFYVDFREYEYDLKWEFPRENLEFGKVLGSGAFG

SEQ ID NO: 6426 - protein, 40 aa, Artificial Sequence
  Description of Artificial Sequence: Synthetic polypeptide
SSDNEYFYVDFREYEYDLKWEFPRENLEFGKVLGSGAFGK

SEQ ID NO: 6427 - protein, 40 aa, Artificial Sequence
  Description of Artificial Sequence: Synthetic polypeptide
SDNEYFYVDFREYEYDLKWEFPRENLEFGKVLGSGAFGKV

SEQ ID NO: 6428 - protein, 40 aa, Artificial Sequence
  Description of Artificial Sequence: Synthetic polypeptide
DNEYFYVDFREYEYDLKWEFPRENLEFGKVLGSGAFGKVM

SEQ ID NO: 6429 - protein, 40 aa, Artificial Sequence
  Description of Artificial Sequence: Synthetic polypeptide
NEYFYVDFREYEYDLKWEFPRENLEFGKVLGSGAFGKVMN

SEQ ID NO: 6430 - protein, 40 aa, Artificial Sequence
  Description of Artificial Sequence: Synthetic polypeptide
DFREYEYDLKWEFPRENLEFGKVLGSGAFGKVMNATAYGI

SEQ ID NO: 6431 - protein, 40 aa, Artificial Sequence
  Description of Artificial Sequence: Synthetic polypeptide
FREYEYDLKWEFPRENLEFGKVLGSGAFGKVMNATAYGIS

SEQ ID NO: 6432 - protein, 40 aa, Artificial Sequence
  Description of Artificial Sequence: Synthetic polypeptide
DLKWEFPRENLEFGKVLGSGAFGKVMNATAYGISKTGVSI

SEQ ID NO: 6433 - protein, 40 aa, Artificial Sequence
  Description of Artificial Sequence: Synthetic polypeptide
EFPRENLEFGKVLGSGAFGKVMNATAYGISKTGVSIQVAV

SEQ ID NO: 6434 - protein, 40 aa, Artificial Sequence
  Description of Artificial Sequence: Synthetic polypeptide
FPRENLEFGKVLGSGAFGKVMNATAYGISKTGVSIQVAVK

SEQ ID NO: 6435 - protein, 40 aa, Artificial Sequence
  Description of Artificial Sequence: Synthetic polypeptide
RENLEFGKVLGSGAFGKVMNATAYGISKTGVSIQVAVKML

SEQ ID NO: 6436 - protein, 40 aa, Artificial Sequence
  Description of Artificial Sequence: Synthetic polypeptide
ENLEFGKVLGSGAFGKVMNATAYGISKTGVSIQVAVKMLK

SEQ ID NO: 6437 - protein, 40 aa, Artificial Sequence
  Description of Artificial Sequence: Synthetic polypeptide
LEFGKVLGSGAFGKVMNATAYGISKTGVSIQVAVKMLKEK

SEQ ID NO: 6438 - protein, 40 aa, Artificial Sequence
  Description of Artificial Sequence: Synthetic polypeptide
GSGAFGKVMNATAYGISKTGVSIQVAVKMLKEKADSSERE

SEQ ID NO: 6439 - protein, 40 aa, Artificial Sequence
  Description of Artificial Sequence: Synthetic polypeptide
GAFGKVMNATAYGISKTGVSIQVAVKMLKEKADSSEREAL

SEQ ID NO: 6440 - protein, 40 aa, Artificial Sequence
  Description of Artificial Sequence: Synthetic polypeptide
AFGKVMNATAYGISKTGVSIQVAVKMLKEKADSSEREALM

SEQ ID NO: 6441 - protein, 40 aa, Artificial Sequence
  Description of Artificial Sequence: Synthetic polypeptide
FGKVMNATAYGISKTGVSIQVAVKMLKEKADSSEREALMS

SEQ ID NO: 6442 - protein, 40 aa, Artificial Sequence
  Description of Artificial Sequence: Synthetic polypeptide
KVMNATAYGISKTGVSIQVAVKMLKEKADSSEREALMSEL

SEQ ID NO: 6443 - protein, 40 aa, Artificial Sequence
  Description of Artificial Sequence: Synthetic polypeptide
VMNATAYGISKTGVSIQVAVKMLKEKADSSEREALMSELK

SEQ ID NO: 6444 - protein, 40 aa, Artificial Sequence
  Description of Artificial Sequence: Synthetic polypeptide
GISKTGVSIQVAVKMLKEKADSSEREALMSELKMMTQLGS

SEQ ID NO: 6445 - protein, 40 aa, Artificial Sequence
  Description of Artificial Sequence: Synthetic polypeptide
KTGVSIQVAVKMLKEKADSSEREALMSELKMMTQLGSHEN

SEQ ID NO: 6446 - protein, 40 aa, Artificial Sequence
  Description of Artificial Sequence: Synthetic polypeptide
SELKMMTQLGSHENIVNLLGACTLSGPIYLIFEYCCYGDL

SEQ ID NO: 6447 - protein, 40 aa, Artificial Sequence
  Description of Artificial Sequence: Synthetic polypeptide
TQLGSHENIVNLLGACTLSGPIYLIFEYCCYGDLLNYLRS

SEQ ID NO: 6448 - protein, 40 aa, Artificial Sequence
  Description of Artificial Sequence: Synthetic polypeptide
IVNLLGACTLSGPIYLIFEYCCYGDLLNYLRSKREKFHRT

SEQ ID NO: 6449 - protein, 40 aa, Artificial Sequence
  Description of Artificial Sequence: Synthetic polypeptide
MGACTLSGPIYLIFEYCCYGDLLNYLRSKREKFHRTWTEI

SEQ ID NO: 6450 - protein, 40 aa, Artificial Sequence
  Description of Artificial Sequence: Synthetic polypeptide
GPIYLIFEYCCYGDLLNYLRSKREKFHRTWTEIFKEHNFS

SEQ ID NO: 6451 - protein, 40 aa, Artificial Sequence
  Description of Artificial Sequence: Synthetic polypeptide
PIYLIFEYCCYGDLLNYLRSKREKFHRTWTEIFKEHNFSF

SEQ ID NO: 6452 - protein, 40 aa, Artificial Sequence
  Description of Artificial Sequence: Synthetic polypeptide
CYGDLLNYLRSKREKFHRTWTEIFKEHNFSFYPTFQSHPN

SEQ ID NO: 6453 - protein, 40 aa, Artificial Sequence
  Description of Artificial Sequence: Synthetic polypeptide
YGDLLNYLRSKREKFHRTWTEIFKEHNFSFYPTFQSHPNS

SEQ ID NO: 6454 - protein, 40 aa, Artificial Sequence
  Description of Artificial Sequence: Synthetic polypeptide
SREVQIHPDSDQISGLHGNSFHSEDEIEYENQKRLEEEED

SEQ ID NO: 6455 - protein, 40 aa, Artificial Sequence
  Description of Artificial Sequence: Synthetic polypeptide
VQIHPDSDQISGLHGNSFHSEDEIEYENQKRLEEEEDLNV

SEQ ID NO: 6456 - protein, 40 aa, Artificial Sequence
  Description of Artificial Sequence: Synthetic polypeptide
QIHPDSDQISGLHGNSFHSEDEIEYENQKRLEEEEDLNVL

SEQ ID NO: 6457 - protein, 40 aa, Artificial Sequence
  Description of Artificial Sequence: Synthetic polypeptide
HPDSDQISGLHGNSFHSEDEIEYENQKRLEEEEDLNVLTF

SEQ ID NO: 6458 - protein, 40 aa, Artificial Sequence
  Description of Artificial Sequence: Synthetic polypeptide
QISGLHGNSFHSEDEIEYENQKRLEEEEDLNVLTFEDLLC

SEQ ID NO: 6459 - protein, 40 aa, Artificial Sequence
  Description of Artificial Sequence: Synthetic polypeptide
IEYENQKRLEEEEDLNVLTFEDLLCFAYQVAKGMEFLEFK

SEQ ID NO: 6460 - protein, 40 aa, Artificial Sequence
  Description of Artificial Sequence: Synthetic polypeptide
YENQKRLEEEEDLNVLTFEDLLCFAYQVAKGMEFLEFKSC

SEQ ID NO: 6461 - protein, 40 aa, Artificial Sequence
  Description of Artificial Sequence: Synthetic polypeptide
MEFLEFKSCVHRDLAARNVLVTHGKVVKICDFGLARDIMS

SEQ ID NO: 6462 - protein, 40 aa, Artificial Sequence
  Description of Artificial Sequence: Synthetic polypeptide
FGLARDIMSDSNYVVRGNARLPVKWMAPESLFEGIYTIKS

SEQ ID NO: 6463 - protein, 40 aa, Artificial Sequence
  Description of Artificial Sequence: Synthetic polypeptide
NARLPVKWMAPESLFEGIYTIKSDVWSYGILLWEIFSLGV

SEQ ID NO: 6464 - protein, 40 aa, Artificial Sequence
  Description of Artificial Sequence: Synthetic polypeptide
ARLPVKWMAPESLFEGIYTIKSDVWSYGILLWEIFSLGVN

SEQ ID NO: 6465 - protein, 40 aa, Artificial Sequence
  Description of Artificial Sequence: Synthetic polypeptide
PVKWMAPESLFEGIYTIKSDVWSYGILLWEIFSLGVNPYP

SEQ ID NO: 6466 - protein, 40 aa, Artificial Sequence
  Description of Artificial Sequence: Synthetic polypeptide
MAPESLFEGIYTIKSDVWSYGILLWEIFSLGVNPYPGIPV

SEQ ID NO: 6467 - protein, 40 aa, Artificial Sequence
  Description of Artificial Sequence: Synthetic polypeptide
VWSYGILLWEIFSLGVNPYPGIPVDANFYKLIQNGFKMDQ

SEQ ID NO: 6468 - protein, 40 aa, Artificial Sequence
  Description of Artificial Sequence: Synthetic polypeptide
ILLWEIFSLGVNPYPGIPVDANFYKLIQNGFKMDQPFYAT

SEQ ID NO: 6469 - protein, 40 aa, Artificial Sequence
  Description of Artificial Sequence: Synthetic polypeptide
IPVDANFYKLIQNGFKMDQPFYATEEIYIIMQSCWAFDSR

SEQ ID NO: 6470 - protein, 40 aa, Artificial Sequence
  Description of Artificial Sequence: Synthetic polypeptide
VDANFYKLIQNGFKMDQPFYATEEIYIIMQSCWAFDSRKR

SEQ ID NO: 6471 - protein, 40 aa, Artificial Sequence
  Description of Artificial Sequence: Synthetic polypeptide
RPSFPNLTSFLGCQLADAEEAMYQNVDGRVSECPHTYQNR

SEQ ID NO: 6472 - protein, 40 aa, Artificial Sequence
  Description of Artificial Sequence: Synthetic polypeptide
MESMMACCLSDEVKESKRINAEIEKQLRRDKRDARRELKL

SEQ ID NO: 6473 - protein, 40 aa, Artificial Sequence
  Description of Artificial Sequence: Synthetic polypeptide
EVKESKRINAEIEKQLRRDKRDARRELKLLLLGTGESGKS

SEQ ID NO: 6474 - protein, 40 aa, Artificial Sequence
  Description of Artificial Sequence: Synthetic polypeptide
KESKRINAEIEKQLRRDKRDARRELKLLLLGTGESGKSTF

SEQ ID NO: 6475 - protein, 40 aa, Artificial Sequence
  Description of Artificial Sequence: Synthetic polypeptide
ESKRINAEIEKQLRRDKRDARRELKLLLLGTGESGKSTFI

SEQ ID NO: 6476 - protein, 40 aa, Artificial Sequence
  Description of Artificial Sequence: Synthetic polypeptide
RINAEIEKQLRRDKRDARRELKLLLLGTGESGKSTFIKQM

SEQ ID NO: 6477 - protein, 40 aa, Artificial Sequence
  Description of Artificial Sequence: Synthetic polypeptide
LKLLLLGTGESGKSTFIKQMRIIHGAGYSEEDKRGFTKLV

SEQ ID NO: 6478 - protein, 40 aa, Artificial Sequence
  Description of Artificial Sequence: Synthetic polypeptide
YKYEQNKANALLIREVDVEKVTTFEHQYVSAIKTLWEDPG

SEQ ID NO: 6479 - protein, 40 aa, Artificial Sequence
  Description of Artificial Sequence: Synthetic polypeptide
TQQDVLRVRVPTTGIIEYPFDLENIIFRMVDVGGQRSERR

SEQ ID NO: 6480 - protein, 40 aa, Artificial Sequence
  Description of Artificial Sequence: Synthetic polypeptide
PTTGIIEYPFDLENIIFRMVDVGGQRSERRKWIHCFENVT

SEQ ID NO: 6481 - protein, 40 aa, Artificial Sequence
  Description of Artificial Sequence: Synthetic polypeptide
TTGIIEYPFDLENIIFRMVDVGGQRSERRKWIHCFENVTS

SEQ ID NO: 6482 - protein, 40 aa, Artificial Sequence
  Description of Artificial Sequence: Synthetic polypeptide
SGKSTFIKQMRIIHGSGYSDEDKRGFTKLVYQNIFTAMQA

SEQ ID NO: 6483 - protein, 40 aa, Artificial Sequence
  Description of Artificial Sequence: Synthetic polypeptide
LKIPYKYEHNKAHAQLVREVDVEKVSAFENPYVDAIKSLW

SEQ ID NO: 6484 - protein, 40 aa, Artificial Sequence
  Description of Artificial Sequence: Synthetic polypeptide
PYKYEHNKAHAQLVREVDVEKVSAFENPYVDAIKSLWNDP

SEQ ID NO: 6485 - protein, 40 aa, Artificial Sequence
  Description of Artificial Sequence: Synthetic polypeptide
KYEHNKAHAQLVREVDVEKVSAFENPYVDAIKSLWNDPGI

SEQ ID NO: 6486 - protein, 40 aa, Artificial Sequence
  Description of Artificial Sequence: Synthetic polypeptide
AHAQLVREVDVEKVSAFENPYVDAIKSLWNDPGIQECYDR

SEQ ID NO: 6487 - protein, 40 aa, Artificial Sequence
  Description of Artificial Sequence: Synthetic polypeptide
AQLVREVDVEKVSAFENPYVDAIKSLWNDPGIQECYDRRR

SEQ ID NO: 6488 - protein, 40 aa, Artificial Sequence
  Description of Artificial Sequence: Synthetic polypeptide
QLVREVDVEKVSAFENPYVDAIKSLWNDPGIQECYDRRRE

SEQ ID NO: 6489 - protein, 40 aa, Artificial Sequence
  Description of Artificial Sequence: Synthetic polypeptide
REVDVEKVSAFENPYVDAIKSLWNDPGIQECYDRRREYQL

SEQ ID NO: 6490 - protein, 40 aa, Artificial Sequence
  Description of Artificial Sequence: Synthetic polypeptide
EVDVEKVSAFENPYVDAIKSLWNDPGIQECYDRRREYQLS

SEQ ID NO: 6491 - protein, 40 aa, Artificial Sequence
  Description of Artificial Sequence: Synthetic polypeptide
DVEKVSAFENPYVDAIKSLWNDPGIQECYDRRREYQLSDS

SEQ ID NO: 6492 - protein, 40 aa, Artificial Sequence
  Description of Artificial Sequence: Synthetic polypeptide
VEKVSAFENPYVDAIKSLWNDPGIQECYDRRREYQLSDST

SEQ ID NO: 6493 - protein, 40 aa, Artificial Sequence
  Description of Artificial Sequence: Synthetic polypeptide
SAFENPYVDAIKSLWNDPGIQECYDRRREYQLSDSTKYYL

SEQ ID NO: 6494 - protein, 40 aa, Artificial Sequence
  Description of Artificial Sequence: Synthetic polypeptide
ENPYVDAIKSLWNDPGIQECYDRRREYQLSDSTKYYLNDL

SEQ ID NO: 6495 - protein, 40 aa, Artificial Sequence
  Description of Artificial Sequence: Synthetic polypeptide
IFRMVDVGGQRSERRKWIHCFENVTSIMFLVALSEYDQVL

SEQ ID NO: 6496 - protein, 40 aa, Artificial Sequence
  Description of Artificial Sequence: Synthetic polypeptide
FRMVDVGGQRSERRKWIHCFENVTSIMFLVALSEYDQVLV

SEQ ID NO: 6497 - protein, 40 aa, Artificial Sequence
  Description of Artificial Sequence: Synthetic polypeptide
VGGQRSERRKWIHCFENVTSIMFLVALSEYDQVLVESDNE

SEQ ID NO: 6498 - protein, 40 aa, Artificial Sequence
  Description of Artificial Sequence: Synthetic polypeptide
ENVTSIMFLVALSEYDQVLVESDNENRMEESKALFRTIIT

SEQ ID NO: 6499 - protein, 40 aa, Artificial Sequence
  Description of Artificial Sequence: Synthetic polypeptide
NVTSIMFLVALSEYDQVLVESDNENRMEESKALFRTIITY

SEQ ID NO: 6500 - protein, 40 aa, Artificial Sequence
  Description of Artificial Sequence: Synthetic polypeptide
VTSIMFLVALSEYDQVLVESDNENRMEESKALFRTIITYP

SEQ ID NO: 6501 - protein, 40 aa, Artificial Sequence
  Description of Artificial Sequence: Synthetic polypeptide
ESDNENRMEESKALFRTIITYPWFQNSSVILFLNKKDLLE

SEQ ID NO: 6502 - protein, 40 aa, Artificial Sequence
  Description of Artificial Sequence: Synthetic polypeptide
SDNENRMEESKALFRTIITYPWFQNSSVILFLNKKDLLEE

SEQ ID NO: 6503 - protein, 40 aa, Artificial Sequence
  Description of Artificial Sequence: Synthetic polypeptide
DNENRMEESKALFRTIITYPWFQNSSVILFLNKKDLLEEK

SEQ ID NO: 6504 - protein, 40 aa, Artificial Sequence
  Description of Artificial Sequence: Synthetic polypeptide
NENRMEESKALFRTIITYPWFQNSSVILFLNKKDLLEEKI

SEQ ID NO: 6505 - protein, 40 aa, Artificial Sequence
  Description of Artificial Sequence: Synthetic polypeptide
MEESKALFRTIITYPWFQNSSVILFLNKKDLLEEKIMYSH

SEQ ID NO: 6506 - protein, 40 aa, Artificial Sequence
  Description of Artificial Sequence: Synthetic polypeptide
EESKALFRTIITYPWFQNSSVILFLNKKDLLEEKIMYSHL

SEQ ID NO: 6507 - protein, 40 aa, Artificial Sequence
  Description of Artificial Sequence: Synthetic polypeptide
SKALFRTIITYPWFQNSSVILFLNKKDLLEEKIMYSHLVD

SEQ ID NO: 6508 - protein, 40 aa, Artificial Sequence
  Description of Artificial Sequence: Synthetic polypeptide
KALFRTIITYPWFQNSSVILFLNKKDLLEEKIMYSHLVDY

SEQ ID NO: 6509 - protein, 40 aa, Artificial Sequence
  Description of Artificial Sequence: Synthetic polypeptide
VDLNPDSDKIIYSHFTCATDTENIRFVFAAVKDTILQLNL

SEQ ID NO: 6510 - protein, 40 aa, Artificial Sequence
  Description of Artificial Sequence: Synthetic polypeptide
DLNPDSDKIIYSHFTCATDTENIRFVFAAVKDTILQLNLK

SEQ ID NO: 6511 - protein, 40 aa, Artificial Sequence; identical to SEQ ID NO: 867
  Description of Artificial Sequence: Synthetic polypeptide

SEQ ID NO: 6512 - protein, 40 aa, Artificial Sequence
  Description of Artificial Sequence: Synthetic polypeptide
PGVVISDDEPGYDLDLFCIPNHYAEDLERVFIPHGLIMDR

SEQ ID NO: 6513 - protein, 40 aa, Artificial Sequence
  Description of Artificial Sequence: Synthetic polypeptide
DVMKEMGGHHIVALCVLKGGYKFFADLLDYIKALNRNSDR

SEQ ID NO: 6514 - protein, 40 aa, Artificial Sequence; identical to SEQ ID NO: 869
  Description of Artificial Sequence: Synthetic polypeptide

SEQ ID NO: 6515 - protein, 40 aa, Artificial Sequence; identical to SEQ ID NO: 2683
  Description of Artificial Sequence: Synthetic polypeptide

SEQ ID NO: 6516 - protein, 40 aa, Artificial Sequence
  Description of Artificial Sequence: Synthetic polypeptide
VALCVLKGGYKFFADLLDYIKALNRNSDRSIPMTVDFIRL

SEQ ID NO: 6517 - protein, 40 aa, Artificial Sequence
  Description of Artificial Sequence: Synthetic polypeptide
LKGGYKFFADLLDYIKALNRNSDRSIPMTVDFIRLKSYCN

SEQ ID NO: 6518 - protein, 40 aa, Artificial Sequence; identical to SEQ ID NO: 3142
  Description of Artificial Sequence: Synthetic polypeptide

SEQ ID NO: 6519 - protein, 40 aa, Artificial Sequence
  Description of Artificial Sequence: Synthetic polypeptide
IGGDDLSTLTGKNVLIVEDIIDTGKTMQTLLSLVRQYNPK

SEQ ID NO: 6520 - protein, 40 aa, Artificial Sequence
  Description of Artificial Sequence: Synthetic polypeptide
GDDLSTLTGKNVLIVEDIIDTGKTMQTLLSLVRQYNPKMV

SEQ ID NO: 6521 - protein, 40 aa, Artificial Sequence
  Description of Artificial Sequence: Synthetic polypeptide
KNVLIVEDIIDTGKTMQTLLSLVRQYNPKMVKVASLLVKR

SEQ ID NO: 6522 - protein, 40 aa, Artificial Sequence
  Description of Artificial Sequence: Synthetic polypeptide
VGYKPDFVGFEIPDKFVVGYALDYNEYFRDLNHVCVISET

SEQ ID NO: 6523 - protein, 40 aa, Artificial Sequence
  Description of Artificial Sequence: Synthetic polypeptide
DFVGFEIPDKFVVGYALDYNEYFRDLNHVCVISETGKAKY

SEQ ID NO: 6524 - protein, 40 aa, Artificial Sequence
  Description of Artificial Sequence: Synthetic polypeptide
VGFEIPDKFVVGYALDYNEYFRDLNHVCVISETGKAKYKA

SEQ ID NO: 6525 - protein, 39 aa, Artificial Sequence
  Description of Artificial Sequence: Synthetic polypeptide
GFEIPDKFVVGYALDYNEYFRDLNHVCVISETGKAKYKA

SEQ ID NO: 6526 - protein, 40 aa, Artificial Sequence
  Description of Artificial Sequence: Synthetic polypeptide
VVVGAGGVGKSALTIQLIQNHFVDEYDPTIEDSYRKQVVI

SEQ ID NO: 6527 - protein, 40 aa, Artificial Sequence
  Description of Artificial Sequence: Synthetic polypeptide
RTVESRQAQDLARSYGIPYIETSAKTRQGVEDAFYTLVRE

SEQ ID NO: 6528 - protein, 40 aa, Artificial Sequence
  Description of Artificial Sequence: Synthetic polypeptide
MSKKISGGSVVEMQGDEMTRIIWELIKEKLIFPYVELDLH

SEQ ID NO: 6529 - protein, 40 aa, Artificial Sequence
  Description of Artificial Sequence: Synthetic polypeptide
VEMQGDEMTRIIWELIKEKLIFPYVELDLHSYDLGIENRD

SEQ ID NO: 6530 - protein, 40 aa, Artificial Sequence
  Description of Artificial Sequence: Synthetic polypeptide
DLGIENRDATNDQVTKDAAEAIKKHNVGVKCATITPDEKR

SEQ ID NO: 6531 - protein, 40 aa, Artificial Sequence
  Description of Artificial Sequence: Synthetic polypeptide
NILGGTVFREAIICKNIPRLVSGWVKPIIIGRHAYGDQYR

SEQ ID NO: 6532 - protein, 40 aa, Artificial Sequence
  Description of Artificial Sequence: Synthetic polypeptide
GWVKPIIIGRHAYGDQYRATDFVVPGPGKVEITYTPSDGT

SEQ ID NO: 6533 - protein, 40 aa, Artificial Sequence
  Description of Artificial Sequence: Synthetic polypeptide
WVKPIIIGRHAYGDQYRATDFVVPGPGKVEITYTPSDGTQ

SEQ ID NO: 6534 - protein, 40 aa, Artificial Sequence
  Description of Artificial Sequence: Synthetic polypeptide
IIGRHAYGDQYRATDFVVPGPGKVEITYTPSDGTQKVTYL

SEQ ID NO: 6535 - protein, 40 aa, Artificial Sequence
  Description of Artificial Sequence: Synthetic polypeptide
IGRHAYGDQYRATDFVVPGPGKVEITYTPSDGTQKVTYLV

SEQ ID NO: 6536 - protein, 40 aa, Artificial Sequence
  Description of Artificial Sequence: Synthetic polypeptide
GRHAYGDQYRATDFVVPGPGKVEITYTPSDGTQKVTYLVH

SEQ ID NO: 6537 - protein, 40 aa, Artificial Sequence
  Description of Artificial Sequence: Synthetic polypeptide
RHAYGDQYRATDFVVPGPGKVEITYTPSDGTQKVTYLVHN

SEQ ID NO: 6538 - protein, 40 aa, Artificial Sequence
  Description of Artificial Sequence: Synthetic polypeptide
AYGDQYRATDFVVPGPGKVEITYTPSDGTQKVTYLVHNFE

SEQ ID NO: 6539 - protein, 40 aa, Artificial Sequence
  Description of Artificial Sequence: Synthetic polypeptide
GDQYRATDFVVPGPGKVEITYTPSDGTQKVTYLVHNFEEG

SEQ ID NO: 6540 - protein, 40 aa, Artificial Sequence
  Description of Artificial Sequence: Synthetic polypeptide
FVVPGPGKVEITYTPSDGTQKVTYLVHNFEEGGGVAMGMY

SEQ ID NO: 6541 - protein, 40 aa, Artificial Sequence
  Description of Artificial Sequence: Synthetic polypeptide
VPGPGKVEITYTPSDGTQKVTYLVHNFEEGGGVAMGMYNQ

SEQ ID NO: 6542 - protein, 40 aa, Artificial Sequence
  Description of Artificial Sequence: Synthetic polypeptide
GPGKVEITYTPSDGTQKVTYLVHNFEEGGGVAMGMYNQDK

SEQ ID NO: 6543 - protein, 40 aa, Artificial Sequence
  Description of Artificial Sequence: Synthetic polypeptide
GKVEITYTPSDGTQKVTYLVHNFEEGGGVAMGMYNQDKSI

SEQ ID NO: 6544 - protein, 40 aa, Artificial Sequence
  Description of Artificial Sequence: Synthetic polypeptide
KVEITYTPSDGTQKVTYLVHNFEEGGGVAMGMYNQDKSIE

SEQ ID NO: 6545 - protein, 40 aa, Artificial Sequence
  Description of Artificial Sequence: Synthetic polypeptide
PSDGTQKVTYLVHNFEEGGGVAMGMYNQDKSIEDFAHSSF

SEQ ID NO: 6546 - protein, 40 aa, Artificial Sequence
  Description of Artificial Sequence: Synthetic polypeptide
EDFAHSSFQMALSKGWPLYLSTKNTILKKYDGRFKDIFQE

SEQ ID NO: 6547 - protein, 40 aa, Artificial Sequence
  Description of Artificial Sequence: Synthetic polypeptide
FAHSSFQMALSKGWPLYLSTKNTILKKYDGRFKDIFQEIY

SEQ ID NO: 6548 - protein, 40 aa, Artificial Sequence
  Description of Artificial Sequence: Synthetic polypeptide
QMALSKGWPLYLSTKNTILKKYDGRFKDIFQEIYDKQYKS

SEQ ID NO: 6549 - protein, 40 aa, Artificial Sequence
  Description of Artificial Sequence: Synthetic polypeptide
SKGWPLYLSTKNTILKKYDGRFKDIFQEIYDKQYKSQFEA

SEQ ID NO: 6550 - protein, 40 aa, Artificial Sequence
  Description of Artificial Sequence: Synthetic polypeptide
NTILKKYDGRFKDIFQEIYDKQYKSQFEAQKIWYEHRLID

SEQ ID NO: 6551 - protein, 40 aa, Artificial Sequence
  Description of Artificial Sequence: Synthetic polypeptide
KQYKSQFEAQKIWYEHRLIDDMVAQAMKSEGGFIWACKNY

SEQ ID NO: 6552 - protein, 40 aa, Artificial Sequence
  Description of Artificial Sequence: Synthetic polypeptide
FIWACKNYDGDVQSDSVAQGYGSLGMMTSVLVCPDGKTVE

SEQ ID NO: 6553 - protein, 40 aa, Artificial Sequence
  Description of Artificial Sequence: Synthetic polypeptide
CKNYDGDVQSDSVAQGYGSLGMMTSVLVCPDGKTVEAEAA

SEQ ID NO: 6554 - protein, 40 aa, Artificial Sequence
  Description of Artificial Sequence: Synthetic polypeptide
ETSTNPIASIFAWTRGLAHRAKLDNNKELAFFANALEEVS

SEQ ID NO: 6555 - protein, 40 aa, Artificial Sequence
  Description of Artificial Sequence: Synthetic polypeptide
SIFAWTRGLAHRAKLDNNKELAFFANALEEVSIETIEAGF

SEQ ID NO: 6556 - protein, 40 aa, Artificial Sequence
  Description of Artificial Sequence: Synthetic polypeptide
KLDNNKELAFFANALEEVSIETIEAGFMTKDLAACIKGLP

SEQ ID NO: 6557 - protein, 40 aa, Artificial Sequence
  Description of Artificial Sequence: Synthetic polypeptide
FMTKDLAACIKGLPNVQRSDYLNTFEFMDKLGENLKIKLA

SEQ ID NO: 6558 - protein, 40 aa, Artificial Sequence
  Description of Artificial Sequence: Synthetic polypeptide
VRSLCRASGSRPAWAPAALTAPTSQEQPRRHYADKRIKVA

SEQ ID NO: 6559 - protein, 40 aa, Artificial Sequence
  Description of Artificial Sequence: Synthetic polypeptide
RSLCRASGSRPAWAPAALTAPTSQEQPRRHYADKRIKVAK

SEQ ID NO: 6560 - protein, 40 aa, Artificial Sequence
  Description of Artificial Sequence: Synthetic polypeptide
SLCRASGSRPAWAPAALTAPTSQEQPRRHYADKRIKVAKP

SEQ ID NO: 6561 - protein, 40 aa, Artificial Sequence
  Description of Artificial Sequence: Synthetic polypeptide
CRASGSRPAWAPAALTAPTSQEQPRRHYADKRIKVAKPVV

SEQ ID NO: 6562 - protein, 40 aa, Artificial Sequence
  Description of Artificial Sequence: Synthetic polypeptide
GSRPAWAPAALTAPTSQEQPRRHYADKRIKVAKPVVEMDG

SEQ ID NO: 6563 - protein, 40 aa, Artificial Sequence
  Description of Artificial Sequence: Synthetic polypeptide
EKLILPHVDIQLKYFDLGLPNRDQTDDQVTIDSALATQKY

SEQ ID NO: 6564 - protein, 40 aa, Artificial Sequence
  Description of Artificial Sequence: Synthetic polypeptide
VFTPKDGSGVKEWEVYNFPAGGVGMGMYNTDESISGFAHS

SEQ ID NO: 6565 - protein, 40 aa, Artificial Sequence
  Description of Artificial Sequence: Synthetic polypeptide
FQYAIQKKWPLYMSTKNTILKAYDGRFKDIFQEIFDKHYK

SEQ ID NO: 6566 - protein, 40 aa, Artificial Sequence
  Description of Artificial Sequence: Synthetic polypeptide
PLYMSTKNTILKAYDGRFKDIFQEIFDKHYKTDFDKNKIW

SEQ ID NO: 6567 - protein, 40 aa, Artificial Sequence
  Description of Artificial Sequence: Synthetic polypeptide
STKNTILKAYDGRFKDIFQEIFDKHYKTDFDKNKIWYEHR

SEQ ID NO: 6568 - protein, 40 aa, Artificial Sequence
  Description of Artificial Sequence: Synthetic polypeptide
TILKAYDGRFKDIFQEIFDKHYKTDFDKNKIWYEHRLIDD

SEQ ID NO: 6569 - protein, 40 aa, Artificial Sequence
  Description of Artificial Sequence: Synthetic polypeptide
ILKAYDGRFKDIFQEIFDKHYKTDFDKNKIWYEHRLIDDM

SEQ ID NO: 6570 - protein, 40 aa, Artificial Sequence
  Description of Artificial Sequence: Synthetic polypeptide
WYEHRLIDDMVAQVLKSSGGFVWACKNYDGDVQSDILAQG

SEQ ID NO: 6571 - protein, 40 aa, Artificial Sequence
  Description of Artificial Sequence: Synthetic polypeptide
GFGSLGLMTSVLVCPDGKTIEAEAAHGTVTRHYREHQKGR

SEQ ID NO: 6572 - protein, 40 aa, Artificial Sequence
  Description of Artificial Sequence: Synthetic polypeptide
NLSHCQLVTLISRDDLNVRCESEVFHACINWVKYDCEQRR

SEQ ID NO: 6573 - protein, 40 aa, Artificial Sequence
  Description of Artificial Sequence: Synthetic polypeptide
TLISRDDLNVRCESEVFHACINWVKYDCEQRRFYVQALLR

SEQ ID NO: 6574 - protein, 40 aa, Artificial Sequence
  Description of Artificial Sequence: Synthetic polypeptide
YVQALLRAVRCHSLTPNFLQMQLQKCEILQSDSRCKDYLV

SEQ ID NO: 6575 - protein, 40 aa, Artificial Sequence
  Description of Artificial Sequence: Synthetic polypeptide
KIFEELTLHKPTQVMPCRAPKVGRLIYTAGGYFRQSLSYL

SEQ ID NO: 6576 - protein, 40 aa, Artificial Sequence
  Description of Artificial Sequence: Synthetic polypeptide
ELTLHKPTQVMPCRAPKVGRLIYTAGGYFRQSLSYLEAYN

SEQ ID NO: 6577 - protein, 40 aa, Artificial Sequence
  Description of Artificial Sequence: Synthetic polypeptide
QVMPCRAPKVGRLIYTAGGYFRQSLSYLEAYNPSDGTWLR

SEQ ID NO: 6578 - protein, 40 aa, Artificial Sequence
  Description of Artificial Sequence: Synthetic polypeptide
PKVGRLIYTAGGYFRQSLSYLEAYNPSDGTWLRLADLQVP

SEQ ID NO: 6579 - protein, 40 aa, Artificial Sequence
  Description of Artificial Sequence: Synthetic polypeptide
PSDGTWLRLADLQVPRSGLAGCVVGGLLYAVGGRNNSPDG

SEQ ID NO: 6580 - protein, 40 aa, Artificial Sequence
  Description of Artificial Sequence: Synthetic polypeptide
TWLRLADLQVPRSGLAGCVVGGLLYAVGGRNNSPDGNTDS

SEQ ID NO: 6581 - protein, 40 aa, Artificial Sequence
  Description of Artificial Sequence: Synthetic polypeptide
GVGVAVLNRLLYAVGGFDGTNRLNSAECYYPERNEWRMIT

SEQ ID NO: 6582 - protein, 40 aa, Artificial Sequence
  Description of Artificial Sequence: Synthetic polypeptide
RSGAGVCVLHNCIYAAGGYDGQDQLNSVERYDVETETWTF

SEQ ID NO: 6583 - protein, 40 aa, Artificial Sequence
  Description of Artificial Sequence: Synthetic polypeptide
CTDPGFVKWTFEILDETNENKQNEWITEKAEATNTGKYTC

SEQ ID NO: 6584 - protein, 40 aa, Artificial Sequence
  Description of Artificial Sequence: Synthetic polypeptide
NEWITEKAEATNTGKYTCTNKHGLSNSIYVFVRDPAKLFL

SEQ ID NO: 6585 - protein, 40 aa, Artificial Sequence
  Description of Artificial Sequence: Synthetic polypeptide
PKAGIMIKSVKRAYHRLCLHCSVDQEGKSVLSEKFILKVR

SEQ ID NO: 6586 - protein, 40 aa, Artificial Sequence
  Description of Artificial Sequence: Synthetic polypeptide
ILKVRPAFKAVPVVSVSKASYLLREGEEFTVTCTIKDVSS

SEQ ID NO: 6587 - protein, 40 aa, Artificial Sequence
  Description of Artificial Sequence: Synthetic polypeptide
LLREGEEFTVTCTIKDVSSSVYSTWKRENSQTKLQEKYNS

SEQ ID NO: 6588 - protein, 40 aa, Artificial Sequence
  Description of Artificial Sequence: Synthetic polypeptide
LREGEEFTVTCTIKDVSSSVYSTWKRENSQTKLQEKYNSW

SEQ ID NO: 6589 - protein, 40 aa, Artificial Sequence
  Description of Artificial Sequence: Synthetic polypeptide
EGEEFTVTCTIKDVSSSVYSTWKRENSQTKLQEKYNSWHH

SEQ ID NO: 6590 - protein, 40 aa, Artificial Sequence
  Description of Artificial Sequence: Synthetic polypeptide
EFTVTCTIKDVSSSVYSTWKRENSQTKLQEKYNSWHHGDF

SEQ ID NO: 6591 - protein, 40 aa, Artificial Sequence
  Description of Artificial Sequence: Synthetic polypeptide
FTVTCTIKDVSSSVYSTWKRENSQTKLQEKYNSWHHGDFN

SEQ ID NO: 6592 - protein, 40 aa, Artificial Sequence
  Description of Artificial Sequence: Synthetic polypeptide
KRENSQTKLQEKYNSWHHGDFNYERQATLTISSARVNDSG

SEQ ID NO: 6593 - protein, 40 aa, Artificial Sequence
  Description of Artificial Sequence: Synthetic polypeptide
SQTKLQEKYNSWHHGDFNYERQATLTISSARVNDSGVFMC

SEQ ID NO: 6594 - protein, 40 aa, Artificial Sequence
  Description of Artificial Sequence: Synthetic polypeptide
RQATLTISSARVNDSGVFMCYANNTFGSANVTTTLEVVDK

SEQ ID NO: 6595 - protein, 40 aa, Artificial Sequence
  Description of Artificial Sequence: Synthetic polypeptide
MTISSARVNDSGVFMCYANNTFGSANVTTTLEVVDKGFIN

SEQ ID NO: 6596 - protein, 40 aa, Artificial Sequence
  Description of Artificial Sequence: Synthetic polypeptide
ISSARVNDSGVFMCYANNTFGSANVTTTLEVVDKGFINIF

SEQ ID NO: 6597 - protein, 40 aa, Artificial Sequence
  Description of Artificial Sequence: Synthetic polypeptide
ARVNDSGVFMCYANNTFGSANVTTTLEVVDKGFINIFPMI

SEQ ID NO: 6598 - protein, 40 aa, Artificial Sequence
  Description of Artificial Sequence: Synthetic polypeptide
ANNTFGSANVTTTLEVVDKGFINIFPMINTTVFVNDGENV

SEQ ID NO: 6599 - protein, 40 aa, Artificial Sequence
  Description of Artificial Sequence: Synthetic polypeptide
MEVVDKGFINIFPMINTTVFVNDGENVDLIVEYEAFPKPE

SEQ ID NO: 6600 - protein, 40 aa, Artificial Sequence
  Description of Artificial Sequence: Synthetic polypeptide
FINIFPMINTTVFVNDGENVDLIVEYEAFPKPEHQQWIYM

SEQ ID NO: 6601 - protein, 40 aa, Artificial Sequence
  Description of Artificial Sequence: Synthetic polypeptide
MIVEYEAFPKPEHQQWIYMNRTFTDKWEDYPKSENESNIR

SEQ ID NO: 6602 - protein, 40 aa, Artificial Sequence
  Description of Artificial Sequence: Synthetic polypeptide
KPEHQQWIYMNRTFTDKWEDYPKSENESNIRYVSELHLTR

SEQ ID NO: 6603 - protein, 40 aa, Artificial Sequence
  Description of Artificial Sequence: Synthetic polypeptide
WIYMNRTFTDKWEDYPKSENESNIRYVSELHLTRLKGTEG

SEQ ID NO: 6604 - protein, 40 aa, Artificial Sequence
  Description of Artificial Sequence: Synthetic polypeptide
RTFTDKWEDYPKSENESNIRYVSELHLTRLKGTEGGTYTF

SEQ ID NO: 6605 - protein, 40 aa, Artificial Sequence
  Description of Artificial Sequence: Synthetic polypeptide
WEDYPKSENESNIRYVSELHLTRLKGTEGGTYTFLVSNSD

SEQ ID NO: 6606 - protein, 40 aa, Artificial Sequence
  Description of Artificial Sequence: Synthetic polypeptide
EDYPKSENESNIRYVSELHLTRLKGTEGGTYTFLVSNSDV

SEQ ID NO: 6607 - protein, 40 aa, Artificial Sequence
  Description of Artificial Sequence: Synthetic polypeptide
SENESNIRYVSELHLTRLKGTEGGTYTFLVSNSDVNAAIA

SEQ ID NO: 6608 - protein, 40 aa, Artificial Sequence
  Description of Artificial Sequence: Synthetic polypeptide
ENESNIRYVSELHLTRLKGTEGGTYTFLVSNSDVNAAIAF

SEQ ID NO: 6609 - protein, 40 aa, Artificial Sequence
  Description of Artificial Sequence: Synthetic polypeptide
NESNIRYVSELHLTRLKGTEGGTYTFLVSNSDVNAAIAFN

SEQ ID NO: 6610 - protein, 40 aa, Artificial Sequence
  Description of Artificial Sequence: Synthetic polypeptide
ESNIRYVSELHLTRLKGTEGGTYTFLVSNSDVNAAIAFNV

SEQ ID NO: 6611 - protein, 40 aa, Artificial Sequence
  Description of Artificial Sequence: Synthetic polypeptide
SNIRYVSELHLTRLKGTEGGTYTFLVSNSDVNAAIAFNVY

SEQ ID NO: 6612 - protein, 40 aa, Artificial Sequence
  Description of Artificial Sequence: Synthetic polypeptide
NIRYVSELHLTRLKGTEGGTYTFLVSNSDVNAAIAFNVYV

SEQ ID NO: 6613 - protein, 40 aa, Artificial Sequence
  Description of Artificial Sequence: Synthetic polypeptide
YVSELHLTRLKGTEGGTYTFLVSNSDVNAAIAFNVYVNTK

SEQ ID NO: 6614 - protein, 40 aa, Artificial Sequence
  Description of Artificial Sequence: Synthetic polypeptide
VSELHLTRLKGTEGGTYTFLVSNSDVNAAIAFNVYVNTKP

SEQ ID NO: 6615 - protein, 40 aa, Artificial Sequence
  Description of Artificial Sequence: Synthetic polypeptide
LHLTRLKGTEGGTYTFLVSNSDVNAAIAFNVYVNTKPEIL

SEQ ID NO: 6616 - protein, 40 aa, Artificial Sequence
  Description of Artificial Sequence: Synthetic polypeptide
LTRLKGTEGGTYTFLVSNSDVNAAIAFNVYVNTKPEILTY

SEQ ID NO: 6617 - protein, 40 aa, Artificial Sequence
  Description of Artificial Sequence: Synthetic polypeptide
LKGTEGGTYTFLVSNSDVNAAIAFNVYVNTKPEILTYDRL

SEQ ID NO: 6618 - protein, 40 aa, Artificial Sequence
  Description of Artificial Sequence: Synthetic polypeptide
LQCVAAGFPEPTIDWYFCPGTEQRCSASVLPVDVQTLNSS

SEQ ID NO: 6619 - protein, 40 aa, Artificial Sequence
  Description of Artificial Sequence: Synthetic polypeptide
VAAGFPEPTIDWYFCPGTEQRCSASVLPVDVQTLNSSGPP

SEQ ID NO: 6620 - protein, 40 aa, Artificial Sequence
  Description of Artificial Sequence: Synthetic polypeptide
SVLPVDVQTLNSSGPPFGKLVVQSSIDSSAFKHNGTVECK

SEQ ID NO: 6621 - protein, 40 aa, Artificial Sequence
  Description of Artificial Sequence: Synthetic polypeptide
PPFGKLVVQSSIDSSAFKHNGTVECKAYNDVGKTSAYFNF

SEQ ID NO: 6622 - protein, 40 aa, Artificial Sequence
  Description of Artificial Sequence: Synthetic polypeptide
PFGKLVVQSSIDSSAFKHNGTVECKAYNDVGKTSAYFNFA

SEQ ID NO: 6623 - protein, 40 aa, Artificial Sequence
  Description of Artificial Sequence: Synthetic polypeptide
GKLVVQSSIDSSAFKHNGTVECKAYNDVGKTSAYFNFAFK

SEQ ID NO: 6624 - protein, 40 aa, Artificial Sequence
  Description of Artificial Sequence: Synthetic polypeptide
LVVQSSIDSSAFKHNGTVECKAYNDVGKTSAYFNFAFKGN

SEQ ID NO: 6625 - protein, 40 aa, Artificial Sequence
  Description of Artificial Sequence: Synthetic polypeptide
VVQSSIDSSAFKHNGTVECKAYNDVGKTSAYFNFAFKGNN

SEQ ID NO: 6626 - protein, 40 aa, Artificial Sequence
  Description of Artificial Sequence: Synthetic polypeptide
SSAFKHNGTVECKAYNDVGKTSAYFNFAFKGNNKEQIHPH

SEQ ID NO: 6627 - protein, 40 aa, Artificial Sequence
  Description of Artificial Sequence: Synthetic polypeptide
AFKHNGTVECKAYNDVGKTSAYFNFAFKGNNKEQIHPHTL

SEQ ID NO: 6628 - protein, 40 aa, Artificial Sequence
  Description of Artificial Sequence: Synthetic polypeptide
FKHNGTVECKAYNDVGKTSAYFNFAFKGNNKEQIHPHTLF

SEQ ID NO: 6629 - protein, 40 aa, Artificial Sequence
  Description of Artificial Sequence: Synthetic polypeptide
NGTVECKAYNDVGKTSAYFNFAFKGNNKEQIHPHTLFTPL

SEQ ID NO: 6630 - protein, 40 aa, Artificial Sequence
  Description of Artificial Sequence: Synthetic polypeptide
TVECKAYNDVGKTSAYFNFAFKGNNKEQIHPHTLFTPLLI

SEQ ID NO: 6631 - protein, 40 aa, Artificial Sequence
  Description of Artificial Sequence: Synthetic polypeptide
ECKAYNDVGKTSAYFNFAFKGNNKEQIHPHTLFTPLLIGF

SEQ ID NO: 6632 - protein, 40 aa, Artificial Sequence
  Description of Artificial Sequence: Synthetic polypeptide
KAYNDVGKTSAYFNFAFKGNNKEQIHPHTLFTPLLIGFVI

SEQ ID NO: 6633 - protein, 40 aa, Artificial Sequence
  Description of Artificial Sequence: Synthetic polypeptide
AYNDVGKTSAYFNFAFKGNNKEQIHPHTLFTPLLIGFVIV

SEQ ID NO: 6634 - protein, 40 aa, Artificial Sequence
  Description of Artificial Sequence: Synthetic polypeptide
YNDVGKTSAYFNFAFKGNNKEQIHPHTLFTPLLIGFVIVA

SEQ ID NO: 6635 - protein, 40 aa, Artificial Sequence
  Description of Artificial Sequence: Synthetic polypeptide
SAYFNFAFKGNNKEQIHPHTLFTPLLIGFVIVAGMMCIIV

SEQ ID NO: 6636 - protein, 40 aa, Artificial Sequence
  Description of Artificial Sequence: Synthetic polypeptide
FNFAFKGNNKEQIHPHTLFTPLLIGFVIVAGMMCIIVMIL

SEQ ID NO: 6637 - protein, 40 aa, Artificial Sequence
  Description of Artificial Sequence: Synthetic polypeptide
FAFKGNNKEQIHPHTLFTPLLIGFVIVAGMMCIIVMILTY

SEQ ID NO: 6638 - protein, 40 aa, Artificial Sequence
  Description of Artificial Sequence: Synthetic polypeptide
AFKGNNKEQIHPHTLFTPLLIGFVIVAGMMCIIVMILTYK

SEQ ID NO: 6639 - protein, 40 aa, Artificial Sequence
  Description of Artificial Sequence: Synthetic polypeptide
FKGNNKEQIHPHTLFTPLLIGFVIVAGMMCIIVMILTYKY

SEQ ID NO: 6640 - protein, 40 aa, Artificial Sequence
  Description of Artificial Sequence: Synthetic polypeptide
EQIHPHTLFTPLLIGFVIVAGMMCIIVMILTYKYLQKPMY

SEQ ID NO: 6641 - protein, 40 aa, Artificial Sequence
  Description of Artificial Sequence: Synthetic polypeptide
HTLFTPLLIGFVIVAGMMCIIVMILTYKYLQKPMYEVQWK

SEQ ID NO: 6642 - protein, 40 aa, Artificial Sequence
  Description of Artificial Sequence: Synthetic polypeptide
TLFTPLLIGFVIVAGMMCIIVMILTYKYLQKPMYEVQWKV

SEQ ID NO: 6643 - protein, 40 aa, Artificial Sequence
  Description of Artificial Sequence: Synthetic polypeptide
FTPLLIGFVIVAGMMCIIVMILTYKYLQKPMYEVQWKVVE

SEQ ID NO: 6644 - protein, 40 aa, Artificial Sequence
  Description of Artificial Sequence: Synthetic polypeptide
TPLLIGFVIVAGMMCIIVMILTYKYLQKPMYEVQWKVVEE

SEQ ID NO: 6645 - protein, 40 aa, Artificial Sequence
  Description of Artificial Sequence: Synthetic polypeptide
MIGFVIVAGMMCIIVMILTYKYLQKPMYEVQWKVVEEING

SEQ ID NO: 6646 - protein, 40 aa, Artificial Sequence
  Description of Artificial Sequence: Synthetic polypeptide
GFVIVAGMMCIIVMILTYKYLQKPMYEVQWKVVEEINGNN

SEQ ID NO: 6647 - protein, 40 aa, Artificial Sequence
  Description of Artificial Sequence: Synthetic polypeptide
IVAGMMCIIVMILTYKYLQKPMYEVQWKVVEEINGNNYVY

SEQ ID NO: 6648 - protein, 40 aa, Artificial Sequence
  Description of Artificial Sequence: Synthetic polypeptide
VAGMMCIIVMILTYKYLQKPMYEVQWKVVEEINGNNYVYI

SEQ ID NO: 6649 - protein, 40 aa, Artificial Sequence
  Description of Artificial Sequence: Synthetic polypeptide
IIVMILTYKYLQKPMYEVQWKVVEEINGNNYVYIDPTQLP

SEQ ID NO: 6650 - protein, 40 aa, Artificial Sequence
  Description of Artificial Sequence: Synthetic polypeptide
IVMILTYKYLQKPMYEVQWKVVEEINGNNYVYIDPTQLPY

SEQ ID NO: 6651 - protein, 40 aa, Artificial Sequence
  Description of Artificial Sequence: Synthetic polypeptide
MILTYKYLQKPMYEVQWKVVEEINGNNYVYIDPTQLPYDH

SEQ ID NO: 6652 - protein, 40 aa, Artificial Sequence
  Description of Artificial Sequence: Synthetic polypeptide
YKYLQKPMYEVQWKVVEEINGNNYVYIDPTQLPYDHKWEF

SEQ ID NO: 6653 - protein, 40 aa, Artificial Sequence
  Description of Artificial Sequence: Synthetic polypeptide
KYLQKPMYEVQWKVVEEINGNNYVYIDPTQLPYDHKWEFP

SEQ ID NO: 6654 - protein, 40 aa, Artificial Sequence
  Description of Artificial Sequence: Synthetic polypeptide
EEINGNNYVYIDPTQLPYDHKWEFPRNRLSFGKTLGAGAF

SEQ ID NO: 6655 - protein, 40 aa, Artificial Sequence
  Description of Artificial Sequence: Synthetic polypeptide
INGNNYVYIDPTQLPYDHKWEFPRNRLSFGKTLGAGAFGK

SEQ ID NO: 6656 - protein, 40 aa, Artificial Sequence
  Description of Artificial Sequence: Synthetic polypeptide
NGNNYVYIDPTQLPYDHKWEFPRNRLSFGKTLGAGAFGKV

SEQ ID NO: 6657 - protein, 40 aa, Artificial Sequence
  Description of Artificial Sequence: Synthetic polypeptide
LPYDHKWEFPRNRLSFGKTLGAGAFGKVVEATAYGLIKSD

SEQ ID NO: 6658 - protein, 40 aa, Artificial Sequence
  Description of Artificial Sequence: Synthetic polypeptide
PYDHKWEFPRNRLSFGKTLGAGAFGKVVEATAYGLIKSDA

SEQ ID NO: 6659 - protein, 40 aa, Artificial Sequence
  Description of Artificial Sequence: Synthetic polypeptide
EFPRNRLSFGKTLGAGAFGKVVEATAYGLIKSDAAMTVAV

SEQ ID NO: 6660 - protein, 40 aa, Artificial Sequence
  Description of Artificial Sequence: Synthetic polypeptide
FGKVVEATAYGLIKSDAAMTVAVKMLKPSAHLTEREALMS

SEQ ID NO: 6661 - protein, 40 aa, Artificial Sequence
  Description of Artificial Sequence: Synthetic polypeptide
KPSAHLTEREALMSELKVLSYLGNHMNIVNLLGACTIGGP

SEQ ID NO: 6662 - protein, 40 aa, Artificial Sequence
  Description of Artificial Sequence: Synthetic polypeptide
LMSELKVLSYLGNHMNIVNLLGACTIGGPTLVITEYCCYG

SEQ ID NO: 6663 - protein, 40 aa, Artificial Sequence
  Description of Artificial Sequence: Synthetic polypeptide
ELKVLSYLGNHMNIVNLLGACTIGGPTLVITEYCCYGDLL

SEQ ID NO: 6664 - protein, 40 aa, Artificial Sequence
  Description of Artificial Sequence: Synthetic polypeptide
YLGNHMNIVNLLGACTIGGPTLVITEYCCYGDLLNFLRRK

SEQ ID NO: 6665 - protein, 40 aa, Artificial Sequence
  Description of Artificial Sequence: Synthetic polypeptide
NLLGACTIGGPTLVITEYCCYGDLLNFLRRKRDSFICSKQ

SEQ ID NO: 6666 - protein, 40 aa, Artificial Sequence
  Description of Artificial Sequence: Synthetic polypeptide
ACTIGGPTLVITEYCCYGDLLNFLRRKRDSFICSKQEDHA

SEQ ID NO: 6667 - protein, 40 aa, Artificial Sequence
  Description of Artificial Sequence: Synthetic polypeptide
TIGGPTLVITEYCCYGDLLNFLRRKRDSFICSKQEDHAEA

SEQ ID NO: 6668 - protein, 40 aa, Artificial Sequence
  Description of Artificial Sequence: Synthetic polypeptide
IGGPTLVITEYCCYGDLLNFLRRKRDSFICSKQEDHAEAA

SEQ ID NO: 6669 - protein, 40 aa, Artificial Sequence
  Description of Artificial Sequence: Synthetic polypeptide
GPTLVITEYCCYGDLLNFLRRKRDSFICSKQEDHAEAALY

SEQ ID NO: 6670 - protein, 40 aa, Artificial Sequence
  Description of Artificial Sequence: Synthetic polypeptide
PTLVITEYCCYGDLLNFLRRKRDSFICSKQEDHAEAALYK

SEQ ID NO: 6671 - protein, 40 aa, Artificial Sequence
  Description of Artificial Sequence: Synthetic polypeptide
TLVITEYCCYGDLLNFLRRKRDSFICSKQEDHAEAALYKN

SEQ ID NO: 6672 - protein, 40 aa, Artificial Sequence
  Description of Artificial Sequence: Synthetic polypeptide
MVITEYCCYGDLLNFLRRKRDSFICSKQEDHAEAALYKNL

SEQ ID NO: 6673 - protein, 40 aa, Artificial Sequence
  Description of Artificial Sequence: Synthetic polypeptide
VITEYCCYGDLLNFLRRKRDSFICSKQEDHAEAALYKNLL

SEQ ID NO: 6674 - protein, 40 aa, Artificial Sequence
  Description of Artificial Sequence: Synthetic polypeptide
TEYCCYGDLLNFLRRKRDSFICSKQEDHAEAALYKNLLHS

SEQ ID NO: 6675 - protein, 40 aa, Artificial Sequence
  Description of Artificial Sequence: Synthetic polypeptide
EYCCYGDLLNFLRRKRDSFICSKQEDHAEAALYKNLLHSK

SEQ ID NO: 6676 - protein, 40 aa, Artificial Sequence
  Description of Artificial Sequence: Synthetic polypeptide
YCCYGDLLNFLRRKRDSFICSKQEDHAEAALYKNLLHSKE

SEQ ID NO: 6677 - protein, 40 aa, Artificial Sequence
  Description of Artificial Sequence: Synthetic polypeptide
CCYGDLLNFLRRKRDSFICSKQEDHAEAALYKNLLHSKES

SEQ ID NO: 6678 - protein, 40 aa, Artificial Sequence
  Description of Artificial Sequence: Synthetic polypeptide
YGDLLNFLRRKRDSFICSKQEDHAEAALYKNLLHSKESSC

SEQ ID NO: 6679 - protein, 40 aa, Artificial Sequence
  Description of Artificial Sequence: Synthetic polypeptide
DLLNFLRRKRDSFICSKQEDHAEAALYKNLLHSKESSCSD

SEQ ID NO: 6680 - protein, 40 aa, Artificial Sequence
  Description of Artificial Sequence: Synthetic polypeptide
LLNFLRRKRDSFICSKQEDHAEAALYKNLLHSKESSCSDS

SEQ ID NO: 6681 - protein, 40 aa, Artificial Sequence
  Description of Artificial Sequence: Synthetic polypeptide
DHAEAALYKNLLHSKESSCSDSTNEYMDMKPGVSYVVPTK

SEQ ID NO: 6682 - protein, 40 aa, Artificial Sequence
  Description of Artificial Sequence: Synthetic polypeptide
EAALYKNLLHSKESSCSDSTNEYMDMKPGVSYVVPTKADK

SEQ ID NO: 6683 - protein, 40 aa, Artificial Sequence
  Description of Artificial Sequence: Synthetic polypeptide
NLLHSKESSCSDSTNEYMDMKPGVSYVVPTKADKRRSVRI

SEQ ID NO: 6684 - protein, 40 aa, Artificial Sequence
  Description of Artificial Sequence: Synthetic polypeptide
STNEYMDMKPGVSYVVPTKADKRRSVRIGSYIERDVTPAI

SEQ ID NO: 6685 - protein, 40 aa, Artificial Sequence
  Description of Artificial Sequence: Synthetic polypeptide
NEYMDMKPGVSYVVPTKADKRRSVRIGSYIERDVTPAIME

SEQ ID NO: 6686 - protein, 40 aa, Artificial Sequence
  Description of Artificial Sequence: Synthetic polypeptide
EYMDMKPGVSYVVPTKADKRRSVRIGSYIERDVTPAIMED

SEQ ID NO: 6687 - protein, 40 aa, Artificial Sequence
  Description of Artificial Sequence: Synthetic polypeptide
MDMKPGVSYVVPTKADKRRSVRIGSYIERDVTPAIMEDDE

SEQ ID NO: 6688 - protein, 40 aa, Artificial Sequence
  Description of Artificial Sequence: Synthetic polypeptide
EDDELALDLEDLLSFSYQVAKGMAFLASKNCIHRDLAARN

SEQ ID NO: 6689 - protein, 40 aa, Artificial Sequence
  Description of Artificial Sequence: Synthetic polypeptide
ELALDLEDLLSFSYQVAKGMAFLASKNCIHRDLAARNILL

SEQ ID NO: 6690 - protein, 40 aa, Artificial Sequence
  Description of Artificial Sequence: Synthetic polypeptide
MSFSYQVAKGMAFLASKNCIHRDLAARNILLTHGRITKIC

SEQ ID NO: 6691 - protein, 40 aa, Artificial Sequence
  Description of Artificial Sequence: Synthetic polypeptide
FSYQVAKGMAFLASKNCIHRDLAARNILLTHGRITKICDF

SEQ ID NO: 6692 - protein, 40 aa, Artificial Sequence
  Description of Artificial Sequence: Synthetic polypeptide
RNILLTHGRITKICDFGLARDIKNDSNYVVKGNARLPVKW

SEQ ID NO: 6693 - protein, 40 aa, Artificial Sequence
  Description of Artificial Sequence: Synthetic polypeptide
THGRITKICDFGLARDIKNDSNYVVKGNARLPVKWMAPES

SEQ ID NO: 6694 - protein, 40 aa, Artificial Sequence
  Description of Artificial Sequence: Synthetic polypeptide
KNDSNYVVKGNARLPVKWMAPESIFNCVYTFESDVWSYGI

SEQ ID NO: 6695 - protein, 40 aa, Artificial Sequence
  Description of Artificial Sequence: Synthetic polypeptide
KGNARLPVKWMAPESIFNCVYTFESDVWSYGIFLWELFSL

SEQ ID NO: 6696 - protein, 40 aa, Artificial Sequence
  Description of Artificial Sequence: Synthetic polypeptide
ARLPVKWMAPESIFNCVYTFESDVWSYGIFLWELFSLGSS

SEQ ID NO: 6697 - protein, 40 aa, Artificial Sequence
  Description of Artificial Sequence: Synthetic polypeptide
LPVKWMAPESIFNCVYTFESDVWSYGIFLWELFSLGSSPY

SEQ ID NO: 6698 - protein, 40 aa, Artificial Sequence
  Description of Artificial Sequence: Synthetic polypeptide
KWMAPESIFNCVYTFESDVWSYGIFLWELFSLGSSPYPGM

SEQ ID NO: 6699 - protein, 40 aa, Artificial Sequence
  Description of Artificial Sequence: Synthetic polypeptide
WMAPESIFNCVYTFESDVWSYGIFLWELFSLGSSPYPGMP

SEQ ID NO: 6700 - protein, 40 aa, Artificial Sequence
  Description of Artificial Sequence: Synthetic polypeptide
MAPESIFNCVYTFESDVWSYGIFLWELFSLGSSPYPGMPV

SEQ ID NO: 6701 - protein, 40 aa, Artificial Sequence
  Description of Artificial Sequence: Synthetic polypeptide
ESIFNCVYTFESDVWSYGIFLWELFSLGSSPYPGMPVDSK

SEQ ID NO: 6702 - protein, 40 aa, Artificial Sequence
  Description of Artificial Sequence: Synthetic polypeptide
SIFNCVYTFESDVWSYGIFLWELFSLGSSPYPGMPVDSKF

SEQ ID NO: 6703 - protein, 40 aa, Artificial Sequence
  Description of Artificial Sequence: Synthetic polypeptide
IFNCVYTFESDVWSYGIFLWELFSLGSSPYPGMPVDSKFY

SEQ ID NO: 6704 - protein, 40 aa, Artificial Sequence
  Description of Artificial Sequence: Synthetic polypeptide
FESDVWSYGIFLWELFSLGSSPYPGMPVDSKFYKMIKEGF

SEQ ID NO: 6705 - protein, 40 aa, Artificial Sequence
  Description of Artificial Sequence: Synthetic polypeptide
ESDVWSYGIFLWELFSLGSSPYPGMPVDSKFYKMIKEGFR

SEQ ID NO: 6706 - protein, 40 aa, Artificial Sequence
  Description of Artificial Sequence: Synthetic polypeptide
SDVWSYGIFLWELFSLGSSPYPGMPVDSKFYKMIKEGFRM

SEQ ID NO: 6707 - protein, 40 aa, Artificial Sequence
  Description of Artificial Sequence: Synthetic polypeptide
PYPGMPVDSKFYKMIKEGFRMLSPEHAPAEMYDIMKTCWD

SEQ ID NO: 6708 - protein, 40 aa, Artificial Sequence
  Description of Artificial Sequence: Synthetic polypeptide
TEYKLVVVGAGGVGKSALTIQLIQNHFVDEYDPTIEDSYR

SEQ ID NO: 6709 - protein, 40 aa, Artificial Sequence
  Description of Artificial Sequence: Synthetic polypeptide
KSALTIQLIQNHFVDEYDPTIEDSYRKQVVIDGETCLLDI

SEQ ID NO: 6710 - protein, 40 aa, Artificial Sequence
  Description of Artificial Sequence: Synthetic polypeptide
PTIEDSYRKQVVIDGETCLLDILDTAGQEEYSAMRDQYMR

SEQ ID NO: 6711 - protein, 40 aa, Artificial Sequence
  Description of Artificial Sequence: Synthetic polypeptide
VIDGETCLLDILDTAGQEEYSAMRDQYMRTGEGFLCVFAI

SEQ ID NO: 6712 - protein, 40 aa, Artificial Sequence
  Description of Artificial Sequence: Synthetic polypeptide
ETCLLDILDTAGQEEYSAMRDQYMRTGEGFLCVFAINNTK

SEQ ID NO: 6713 - protein, 40 aa, Artificial Sequence
  Description of Artificial Sequence: Synthetic polypeptide
ILDTAGQEEYSAMRDQYMRTGEGFLCVFAINNTKSFEDIH

SEQ ID NO: 6714 - protein, 40 aa, Artificial Sequence
  Description of Artificial Sequence: Synthetic polypeptide
DTAGQEEYSAMRDQYMRTGEGFLCVFAINNTKSFEDIHHY

SEQ ID NO: 6715 - protein, 40 aa, Artificial Sequence
  Description of Artificial Sequence: Synthetic polypeptide
QEEYSAMRDQYMRTGEGFLCVFAINNTKSFEDIHHYREQI

SEQ ID NO: 6716 - protein, 40 aa, Artificial Sequence
  Description of Artificial Sequence: Synthetic polypeptide
EEYSAMRDQYMRTGEGFLCVFAINNTKSFEDIHHYREQIK

SEQ ID NO: 6717 - protein, 40 aa, Artificial Sequence
  Description of Artificial Sequence: Synthetic polypeptide
EYSAMRDQYMRTGEGFLCVFAINNTKSFEDIHHYREQIKR

SEQ ID NO: 6718 - protein, 40 aa, Artificial Sequence
  Description of Artificial Sequence: Synthetic polypeptide
YMRTGEGFLCVFAINNTKSFEDIHHYREQIKRVKDSEDVP

SEQ ID NO: 6719 - protein, 40 aa, Artificial Sequence
  Description of Artificial Sequence: Synthetic polypeptide
NNTKSFEDIHHYREQIKRVKDSEDVPMVLVGNKCDLPSRT

SEQ ID NO: 6720 - protein, 40 aa, Artificial Sequence
  Description of Artificial Sequence: Synthetic polypeptide
NTKSFEDIHHYREQIKRVKDSEDVPMVLVGNKCDLPSRTV

SEQ ID NO: 6721 - protein, 40 aa, Artificial Sequence
  Description of Artificial Sequence: Synthetic polypeptide
TKSFEDIHHYREQIKRVKDSEDVPMVLVGNKCDLPSRTVD

SEQ ID NO: 6722 - protein, 40 aa, Artificial Sequence
  Description of Artificial Sequence: Synthetic polypeptide
SFEDIHHYREQIKRVKDSEDVPMVLVGNKCDLPSRTVDTK

SEQ ID NO: 6723 - protein, 40 aa, Artificial Sequence
  Description of Artificial Sequence: Synthetic polypeptide
FEDIHHYREQIKRVKDSEDVPMVLVGNKCDLPSRTVDTKQ

SEQ ID NO: 6724 - protein, 40 aa, Artificial Sequence
  Description of Artificial Sequence: Synthetic polypeptide
EDIHHYREQIKRVKDSEDVPMVLVGNKCDLPSRTVDTKQA

SEQ ID NO: 6725 - protein, 40 aa, Artificial Sequence
  Description of Artificial Sequence: Synthetic polypeptide
DIHHYREQIKRVKDSEDVPMVLVGNKCDLPSRTVDTKQAQ

SEQ ID NO: 6726 - protein, 40 aa, Artificial Sequence
  Description of Artificial Sequence: Synthetic polypeptide
IHHYREQIKRVKDSEDVPMVLVGNKCDLPSRTVDTKQAQD

SEQ ID NO: 6727 - protein, 40 aa, Artificial Sequence
  Description of Artificial Sequence: Synthetic polypeptide
HHYREQIKRVKDSEDVPMVLVGNKCDLPSRTVDTKQAQDL

SEQ ID NO: 6728 - protein, 40 aa, Artificial Sequence
  Description of Artificial Sequence: Synthetic polypeptide
HYREQIKRVKDSEDVPMVLVGNKCDLPSRTVDTKQAQDLA

SEQ ID NO: 6729 - protein, 40 aa, Artificial Sequence
  Description of Artificial Sequence: Synthetic polypeptide
YREQIKRVKDSEDVPMVLVGNKCDLPSRTVDTKQAQDLAR

SEQ ID NO: 6730 - protein, 40 aa, Artificial Sequence
  Description of Artificial Sequence: Synthetic polypeptide
REQIKRVKDSEDVPMVLVGNKCDLPSRTVDTKQAQDLARS

SEQ ID NO: 6731 - protein, 40 aa, Artificial Sequence
  Description of Artificial Sequence: Synthetic polypeptide
EQIKRVKDSEDVPMVLVGNKCDLPSRTVDTKQAQDLARSY

SEQ ID NO: 6732 - protein, 40 aa, Artificial Sequence
  Description of Artificial Sequence: Synthetic polypeptide
QIKRVKDSEDVPMVLVGNKCDLPSRTVDTKQAQDLARSYG

SEQ ID NO: 6733 - protein, 40 aa, Artificial Sequence
  Description of Artificial Sequence: Synthetic polypeptide
IKRVKDSEDVPMVLVGNKCDLPSRTVDTKQAQDLARSYGI

SEQ ID NO: 6734 - protein, 40 aa, Artificial Sequence
  Description of Artificial Sequence: Synthetic polypeptide
SEDVPMVLVGNKCDLPSRTVDTKQAQDLARSYGIPFIETS

SEQ ID NO: 6735 - protein, 40 aa, Artificial Sequence
  Description of Artificial Sequence: Synthetic polypeptide
EDVPMVLVGNKCDLPSRTVDTKQAQDLARSYGIPFIETSA

SEQ ID NO: 6736 - protein, 40 aa, Artificial Sequence
  Description of Artificial Sequence: Synthetic polypeptide
MVLVGNKCDLPSRTVDTKQAQDLARSYGIPFIETSAKTRQ

SEQ ID NO: 6737 - protein, 40 aa, Artificial Sequence
  Description of Artificial Sequence: Synthetic polypeptide
LVGNKCDLPSRTVDTKQAQDLARSYGIPFIETSAKTRQRV

SEQ ID NO: 6738 - protein, 40 aa, Artificial Sequence
  Description of Artificial Sequence: Synthetic polypeptide
SRTVDTKQAQDLARSYGIPFIETSAKTRQRVEDAFYTLVR

SEQ ID NO: 6739 - protein, 40 aa, Artificial Sequence
  Description of Artificial Sequence: Synthetic polypeptide
AQDLARSYGIPFIETSAKTRQGVDDAFYTLVREIRKHKEK

SEQ ID NO: 6740 - protein, 40 aa, Artificial Sequence
  Description of Artificial Sequence: Synthetic polypeptide
DLARSYGIPFIETSAKTRQGVDDAFYTLVREIRKHKEKMS

SEQ ID NO: 6741 - protein, 40 aa, Artificial Sequence
  Description of Artificial Sequence: Synthetic polypeptide
ARSYGIPFIETSAKTRQGVDDAFYTLVREIRKHKEKMSKD

SEQ ID NO: 6742 - protein, 40 aa, Artificial Sequence
  Description of Artificial Sequence: Synthetic polypeptide
YGIPFIETSAKTRQRVEDAFYTLVREIRQYRLKKISKEEK

SEQ ID NO: 6743 - protein, 40 aa, Artificial Sequence
  Description of Artificial Sequence: Synthetic polypeptide
YGIPFIETSAKTRQGVDDAFYTLVREIRKHKEKMSKDGKK

SEQ ID NO: 6744 - protein, 40 aa, Artificial Sequence
  Description of Artificial Sequence: Synthetic polypeptide
GIPFIETSAKTRQRVEDAFYTLVREIRQYRLKKISKEEKT

SEQ ID NO: 6745 - protein, 40 aa, Artificial Sequence
  Description of Artificial Sequence: Synthetic polypeptide
GIPFIETSAKTRQGVDDAFYTLVREIRKHKEKMSKDGKKK

SEQ ID NO: 6746 - protein, 40 aa, Artificial Sequence
  Description of Artificial Sequence: Synthetic polypeptide
IPFIETSAKTRQGVDDAFYTLVREIRKHKEKMSKDGKKKK

SEQ ID NO: 6747 - protein, 40 aa, Artificial Sequence
  Description of Artificial Sequence: Synthetic polypeptide
FIETSAKTRQRVEDAFYTLVREIRQYRLKKISKEEKTPGC

SEQ ID NO: 6748 - protein, 40 aa, Artificial Sequence
  Description of Artificial Sequence: Synthetic polypeptide
FIETSAKTRQGVDDAFYTLVREIRKHKEKMSKDGKKKKKK

SEQ ID NO: 6749 - protein, 40 aa, Artificial Sequence
  Description of Artificial Sequence: Synthetic polypeptide
IETSAKTRQRVEDAFYTLVREIRQYRLKKISKEEKTPGCV

SEQ ID NO: 6750 - protein, 40 aa, Artificial Sequence
  Description of Artificial Sequence: Synthetic polypeptide
TSAKTRQRVEDAFYTLVREIRQYRLKKISKEEKTPGCVKI

SEQ ID NO: 6751 - protein, 40 aa, Artificial Sequence
  Description of Artificial Sequence: Synthetic polypeptide
SAKTRQGVDDAFYTLVREIRKHKEKMSKDGKKKKKKSKTK

SEQ ID NO: 6752 - protein, 40 aa, Artificial Sequence
  Description of Artificial Sequence: Synthetic polypeptide
AKTRQGVDDAFYTLVREIRKHKEKMSKDGKKKKKKSKTKC

SEQ ID NO: 6753 - protein, 40 aa, Artificial Sequence
  Description of Artificial Sequence: Synthetic polypeptide
TRQRVEDAFYTLVREIRQYRLKKISKEEKTPGCVKIKKCI

SEQ ID NO: 6754 - protein, 40 aa, Artificial Sequence
  Description of Artificial Sequence: Synthetic polypeptide
TEYKLVVVGADGVGKSALTIQLIQNHFVDEYDPTIEDSYR

SEQ ID NO: 6755 - protein, 40 aa, Artificial Sequence
  Description of Artificial Sequence: Synthetic polypeptide
EYKLVVVGADGVGKSALTIQLIQNHFVDEYDPTIEDSYRK

SEQ ID NO: 6756 - protein, 40 aa, Artificial Sequence
  Description of Artificial Sequence: Synthetic polypeptide
TEYKLVVVGASGVGKSALTIQLIQNHFVDEYDPTIEDSYR

SEQ ID NO: 6757 - protein, 40 aa, Artificial Sequence
  Description of Artificial Sequence: Synthetic polypeptide
VVGAVGVGKSALTIQLIQNHFVDEYDPTIEDSYRKQVVID

SEQ ID NO: 6758 - protein, 40 aa, Artificial Sequence
  Description of Artificial Sequence: Synthetic polypeptide
TEYKLVVVGAGCVGKSALTIQLIQNHFVDEYDPTIEDSYR

SEQ ID NO: 6759 - protein, 40 aa, Artificial Sequence
  Description of Artificial Sequence: Synthetic polypeptide
EYKLVVVGAGCVGKSALTIQLIQNHFVDEYDPTIEDSYRK

SEQ ID NO: 6760 - protein, 40 aa, Artificial Sequence
  Description of Artificial Sequence: Synthetic polypeptide
YKLVVVGAGCVGKSALTIQLIQNHFVDEYDPTIEDSYRKQ

SEQ ID NO: 6761 - protein, 40 aa, Artificial Sequence
  Description of Artificial Sequence: Synthetic polypeptide
TEYKLVVVGAGDVGKSALTIQLIQNHFVDEYDPTIEDSYR

SEQ ID NO: 6762 - protein, 40 aa, Artificial Sequence
  Description of Artificial Sequence: Synthetic polypeptide
EYKLVVVGAGDVGKSALTIQLIQNHFVDEYDPTIEDSYRK

SEQ ID NO: 6763 - protein, 40 aa, Artificial Sequence
  Description of Artificial Sequence: Synthetic polypeptide
KLVVVGAGDVGKSALTIQLIQNHFVDEYDPTIEDSYRKQV

SEQ ID NO: 6764 - protein, 40 aa, Artificial Sequence
  Description of Artificial Sequence: Synthetic polypeptide
LIQNHFVDEYDPTIEDSYRKQVVIDGETCLLDILDTAGHE

SEQ ID NO: 6765 - protein, 40 aa, Artificial Sequence
  Description of Artificial Sequence: Synthetic polypeptide
IQNHFVDEYDPTIEDSYRKQVVIDGETCLLDILDTAGHEE

SEQ ID NO: 6766 - protein, 40 aa, Artificial Sequence
  Description of Artificial Sequence: Synthetic polypeptide
PTIEDSYRKQVVIDGETCLLDILDTAGHEEYSAMRDQYMR

SEQ ID NO: 6767 - protein, 40 aa, Artificial Sequence
  Description of Artificial Sequence: Synthetic polypeptide
DILDTAGHEEYSAMRDQYMRTGEGFLCVFAINNTKSFEDI

SEQ ID NO: 6768 - protein, 40 aa, Artificial Sequence
  Description of Artificial Sequence: Synthetic polypeptide
GHEEYSAMRDQYMRTGEGFLCVFAINNTKSFEDIHHYREQ

SEQ ID NO: 6769 - protein, 40 aa, Artificial Sequence
  Description of Artificial Sequence: Synthetic polypeptide
HEEYSAMRDQYMRTGEGFLCVFAINNTKSFEDIHHYREQI

SEQ ID NO: 6770 - protein, 40 aa, Artificial Sequence; identical to SEQ ID NO: 1006
  Description of Artificial Sequence: Synthetic polypeptide

SEQ ID NO: 6771 - protein, 40 aa, Artificial Sequence; identical to SEQ ID NO: 1007
  Description of Artificial Sequence: Synthetic polypeptide

SEQ ID NO: 6772 - protein, 40 aa, Artificial Sequence; identical to SEQ ID NO: 1008
  Description of Artificial Sequence: Synthetic polypeptide

SEQ ID NO: 6773 - protein, 40 aa, Artificial Sequence; identical to SEQ ID NO: 1009
  Description of Artificial Sequence: Synthetic polypeptide

SEQ ID NO: 6774 - protein, 40 aa, Artificial Sequence; identical to SEQ ID NO: 3192
  Description of Artificial Sequence: Synthetic polypeptide

SEQ ID NO: 6775 - protein, 40 aa, Artificial Sequence; identical to SEQ ID NO: 1010
  Description of Artificial Sequence: Synthetic polypeptide

SEQ ID NO: 6776 - protein, 40 aa, Artificial Sequence
  Description of Artificial Sequence: Synthetic polypeptide
DEYDPTIEDSYRKQVVIDGETCLLDILDTAGKEEYSAMRD

SEQ ID NO: 6777 - protein, 40 aa, Artificial Sequence
  Description of Artificial Sequence: Synthetic polypeptide
YDPTIEDSYRKQVVIDGETCLLDILDTAGKEEYSAMRDQY

SEQ ID NO: 6778 - protein, 40 aa, Artificial Sequence; identical to SEQ ID NO: 3224
  Description of Artificial Sequence: Synthetic polypeptide

SEQ ID NO: 6779 - protein, 40 aa, Artificial Sequence; identical to SEQ ID NO: 2714
  Description of Artificial Sequence: Synthetic polypeptide

SEQ ID NO: 6780 - protein, 40 aa, Artificial Sequence
  Description of Artificial Sequence: Synthetic polypeptide
YRKQVVIDGETCLLDILDTAGKEEYSAMRDQYMRTGEGFL

SEQ ID NO: 6781 - protein, 40 aa, Artificial Sequence; identical to SEQ ID NO: 1013
  Description of Artificial Sequence: Synthetic polypeptide

SEQ ID NO: 6782 - protein, 40 aa, Artificial Sequence; identical to SEQ ID NO: 1014
  Description of Artificial Sequence: Synthetic polypeptide

SEQ ID NO: 6783 - protein, 40 aa, Artificial Sequence; identical to SEQ ID NO: 1016
  Description of Artificial Sequence: Synthetic polypeptide

SEQ ID NO: 6784 - protein, 40 aa, Artificial Sequence
  Description of Artificial Sequence: Synthetic polypeptide
IDGETCLLDILDTAGKEEYSAMRDQYMRTGEGFLCVFAIN

SEQ ID NO: 6785 - protein, 40 aa, Artificial Sequence
  Description of Artificial Sequence: Synthetic polypeptide
GETCLLDILDTAGKEEYSAMRDQYMRTGEGFLCVFAINNT

SEQ ID NO: 6786 - protein, 40 aa, Artificial Sequence
  Description of Artificial Sequence: Synthetic polypeptide
ETCLLDILDTAGKEEYSAMRDQYMRTGEGFLCVFAINNTK

SEQ ID NO: 6787 - protein, 40 aa, Artificial Sequence
  Description of Artificial Sequence: Synthetic polypeptide
TCLLDILDTAGKEEYSAMRDQYMRTGEGFLCVFAINNTKS

SEQ ID NO: 6788 - protein, 40 aa, Artificial Sequence; identical to SEQ ID NO: 1019
  Description of Artificial Sequence: Synthetic polypeptide

SEQ ID NO: 6789 - protein, 40 aa, Artificial Sequence
  Description of Artificial Sequence: Synthetic polypeptide
DILDTAGKEEYSAMRDQYMRTGEGFLCVFAINNTKSFEDI

SEQ ID NO: 6790 - protein, 40 aa, Artificial Sequence; identical to SEQ ID NO: 1020
  Description of Artificial Sequence: Synthetic polypeptide

SEQ ID NO: 6791 - protein, 40 aa, Artificial Sequence
  Description of Artificial Sequence: Synthetic polypeptide
LDTAGKEEYSAMRDQYMRTGEGFLCVFAINNTKSFEDIHH

SEQ ID NO: 6792 - protein, 40 aa, Artificial Sequence; identical to SEQ ID NO: 1021
  Description of Artificial Sequence: Synthetic polypeptide

SEQ ID NO: 6793 - protein, 40 aa, Artificial Sequence; identical to SEQ ID NO: 1022
  Description of Artificial Sequence: Synthetic polypeptide

SEQ ID NO: 6794 - protein, 40 aa, Artificial Sequence; identical to SEQ ID NO: 1023
  Description of Artificial Sequence: Synthetic polypeptide

SEQ ID NO: 6795 - protein, 40 aa, Artificial Sequence
  Description of Artificial Sequence: Synthetic polypeptide
YRKQVVIDGETCLLDILDTAGLEEYSAMRDQYMRTGEGFL

SEQ ID NO: 6796 - protein, 40 aa, Artificial Sequence
  Description of Artificial Sequence: Synthetic polypeptide
LLDILDTAGLEEYSAMRDQYMRTGEGFLCVFAINNTKSFE

SEQ ID NO: 6797 - protein, 40 aa, Artificial Sequence
  Description of Artificial Sequence: Synthetic polypeptide
DTAGLEEYSAMRDQYMRTGEGFLCVFAINNTKSFEDIHHY

SEQ ID NO: 6798 - protein, 40 aa, Artificial Sequence
  Description of Artificial Sequence: Synthetic polypeptide
TAGLEEYSAMRDQYMRTGEGFLCVFAINNTKSFEDIHHYR

SEQ ID NO: 6799 - protein, 40 aa, Artificial Sequence
  Description of Artificial Sequence: Synthetic polypeptide
AGLEEYSAMRDQYMRTGEGFLCVFAINNTKSFEDIHHYRE

SEQ ID NO: 6800 - protein, 40 aa, Artificial Sequence
  Description of Artificial Sequence: Synthetic polypeptide
GLEEYSAMRDQYMRTGEGFLCVFAINNTKSFEDIHHYREQ

SEQ ID NO: 6801 - protein, 40 aa, Artificial Sequence
  Description of Artificial Sequence: Synthetic polypeptide
LEEYSAMRDQYMRTGEGFLCVFAINNTKSFEDIHHYREQI

SEQ ID NO: 6802 - protein, 40 aa, Artificial Sequence; identical to SEQ ID NO: 2716
  Description of Artificial Sequence: Synthetic polypeptide

SEQ ID NO: 6803 - protein, 40 aa, Artificial Sequence
  Description of Artificial Sequence: Synthetic polypeptide
DTAGREEYSAMRDQYMRTGEGFLCVFAINNTKSFEDIHHY

SEQ ID NO: 6804 - protein, 40 aa, Artificial Sequence; identical to SEQ ID NO: 1031
  Description of Artificial Sequence: Synthetic polypeptide

SEQ ID NO: 6805 - protein, 40 aa, Artificial Sequence; identical to SEQ ID NO: 1032
  Description of Artificial Sequence: Synthetic polypeptide

SEQ ID NO: 6806 - protein, 40 aa, Artificial Sequence
  Description of Artificial Sequence: Synthetic polypeptide
KKKPTPIQLNPAPDGSAVNGTSSAETNLEALQKKLEELEL

SEQ ID NO: 6807 - protein, 40 aa, Artificial Sequence
  Description of Artificial Sequence: Synthetic polypeptide
PTPIQLNPAPDGSAVNGTSSAETNLEALQKKLEELELDEQ

SEQ ID NO: 6808 - protein, 40 aa, Artificial Sequence
  Description of Artificial Sequence: Synthetic polypeptide
NPAPDGSAVNGTSSAETNLEALQKKLEELELDEQQRKRLE

SEQ ID NO: 6809 - protein, 40 aa, Artificial Sequence
  Description of Artificial Sequence: Synthetic polypeptide
APDGSAVNGTSSAETNLEALQKKLEELELDEQQRKRLEAF

SEQ ID NO: 6810 - protein, 40 aa, Artificial Sequence
  Description of Artificial Sequence: Synthetic polypeptide
DGSAVNGTSSAETNLEALQKKLEELELDEQQRKRLEAFLT

SEQ ID NO: 6811 - protein, 40 aa, Artificial Sequence
  Description of Artificial Sequence: Synthetic polypeptide
GTSSAETNLEALQKKLEELELDEQQRKRLEAFLTQKQKVG

SEQ ID NO: 6812 - protein, 40 aa, Artificial Sequence
  Description of Artificial Sequence: Synthetic polypeptide
SSAETNLEALQKKLEELELDEQQRKRLEAFLTQKQKVGEL

SEQ ID NO: 6813 - protein, 40 aa, Artificial Sequence
  Description of Artificial Sequence: Synthetic polypeptide
SAETNLEALQKKLEELELDEQQRKRLEAFLTQKQKVGELK

SEQ ID NO: 6814 - protein, 40 aa, Artificial Sequence
  Description of Artificial Sequence: Synthetic polypeptide
NLEALQKKLEELELDEQQRKRLEAFLTQKQKVGELKDDDF

SEQ ID NO: 6815 - protein, 40 aa, Artificial Sequence
  Description of Artificial Sequence: Synthetic polypeptide
EELELDEQQRKRLEAFLTQKQKVGELKDDDFEKISELGAG

SEQ ID NO: 6816 - protein, 40 aa, Artificial Sequence
  Description of Artificial Sequence: Synthetic polypeptide
MEIKPAIRNQIIRELQVLHECNSPYIVGFYGAFYSDGEIS

SEQ ID NO: 6817 - protein, 40 aa, Artificial Sequence
  Description of Artificial Sequence: Synthetic polypeptide
EIKPAIRNQIIRELQVLHECNSPYIVGFYGAFYSDGEISI

SEQ ID NO: 6818 - protein, 40 aa, Artificial Sequence
  Description of Artificial Sequence: Synthetic polypeptide
NSPYIVGFYGAFYSDGEISICMEHMDGGSLDQVLKKAGRI

SEQ ID NO: 6819 - protein, 40 aa, Artificial Sequence
  Description of Artificial Sequence: Synthetic polypeptide
DGEISICMEHMDGGSLDQVLKKAGRIPEQILGKVSIAVIK

SEQ ID NO: 6820 - protein, 40 aa, Artificial Sequence
  Description of Artificial Sequence: Synthetic polypeptide
EISICMEHMDGGSLDQVLKKAGRIPEQILGKVSIAVIKGL

SEQ ID NO: 6821 - protein, 40 aa, Artificial Sequence
  Description of Artificial Sequence: Synthetic polypeptide
HMDGGSLDQVLKKAGRIPEQILGKVSIAVIKGLTYLREKH

SEQ ID NO: 6822 - protein, 40 aa, Artificial Sequence
  Description of Artificial Sequence: Synthetic polypeptide
GGSLDQVLKKAGRIPEQILGKVSIAVIKGLTYLREKHKIM

SEQ ID NO: 6823 - protein, 40 aa, Artificial Sequence
  Description of Artificial Sequence: Synthetic polypeptide
SYMSPERLQGTHYSVQSDIWSMGLSLVEMAVGRYPIPPPD

SEQ ID NO: 6824 - protein, 40 aa, Artificial Sequence
  Description of Artificial Sequence: Synthetic polypeptide
GLSLVEMAVGRYPIPPPDAKELELMFGCQVEGDAAETPPR

SEQ ID NO: 6825 - protein, 40 aa, Artificial Sequence
  Description of Artificial Sequence: Synthetic polypeptide
GMDSRPPMAIFELLDYIVNEPPPKLPSGVFSLEFQDFVNK

SEQ ID NO: 6826 - protein, 40 aa, Artificial Sequence
  Description of Artificial Sequence: Synthetic polypeptide
PPMAIFELLDYIVNEPPPKLPSGVFSLEFQDFVNKCLIKN

SEQ ID NO: 6827 - protein, 40 aa, Artificial Sequence
  Description of Artificial Sequence: Synthetic polypeptide
PMAIFELLDYIVNEPPPKLPSGVFSLEFQDFVNKCLIKNP

SEQ ID NO: 6828 - protein, 40 aa, Artificial Sequence
  Description of Artificial Sequence: Synthetic polypeptide
MAIFELLDYIVNEPPPKLPSGVFSLEFQDFVNKCLIKNPA

SEQ ID NO: 6829 - protein, 40 aa, Artificial Sequence
  Description of Artificial Sequence: Synthetic polypeptide
FELLDYIVNEPPPKLPSGVFSLEFQDFVNKCLIKNPAERA

SEQ ID NO: 6830 - protein, 40 aa, Artificial Sequence
  Description of Artificial Sequence: Synthetic polypeptide
MDYIVNEPPPKLPSGVFSLEFQDFVNKCLIKNPAERADLK

SEQ ID NO: 6831 - protein, 40 aa, Artificial Sequence
  Description of Artificial Sequence: Synthetic polypeptide
DYIVNEPPPKLPSGVFSLEFQDFVNKCLIKNPAERADLKQ

SEQ ID NO: 6832 - protein, 40 aa, Artificial Sequence
  Description of Artificial Sequence: Synthetic polypeptide
IVNEPPPKLPSGVFSLEFQDFVNKCLIKNPAERADLKQLM

SEQ ID NO: 6833 - protein, 40 aa, Artificial Sequence
  Description of Artificial Sequence: Synthetic polypeptide
VNEPPPKLPSGVFSLEFQDFVNKCLIKNPAERADLKQLMV

SEQ ID NO: 6834 - protein, 40 aa, Artificial Sequence
  Description of Artificial Sequence: Synthetic polypeptide
NEPPPKLPSGVFSLEFQDFVNKCLIKNPAERADLKQLMVH

SEQ ID NO: 6835 - protein, 40 aa, Artificial Sequence
  Description of Artificial Sequence: Synthetic polypeptide
EPPPKLPSGVFSLEFQDFVNKCLIKNPAERADLKQLMVHA

SEQ ID NO: 6836 - protein, 40 aa, Artificial Sequence
  Description of Artificial Sequence: Synthetic polypeptide
PPPKLPSGVFSLEFQDFVNKCLIKNPAERADLKQLMVHAF

SEQ ID NO: 6837 - protein, 40 aa, Artificial Sequence
  Description of Artificial Sequence: Synthetic polypeptide
PPKLPSGVFSLEFQDFVNKCLIKNPAERADLKQLMVHAFI

SEQ ID NO: 6838 - protein, 40 aa, Artificial Sequence
  Description of Artificial Sequence: Synthetic polypeptide
PSGVFSLEFQDFVNKCLIKNPAERADLKQLMVHAFIKRSD

SEQ ID NO: 6839 - protein, 40 aa, Artificial Sequence
  Description of Artificial Sequence: Synthetic polypeptide
GVFSLEFQDFVNKCLIKNPAERADLKQLMVHAFIKRSDAE

SEQ ID NO: 6840 - protein, 40 aa, Artificial Sequence
  Description of Artificial Sequence: Synthetic polypeptide
VFSLEFQDFVNKCLIKNPAERADLKQLMVHAFIKRSDAEE

SEQ ID NO: 6841 - protein, 40 aa, Artificial Sequence
  Description of Artificial Sequence: Synthetic polypeptide
FSLEFQDFVNKCLIKNPAERADLKQLMVHAFIKRSDAEEV

SEQ ID NO: 6842 - protein, 40 aa, Artificial Sequence
  Description of Artificial Sequence: Synthetic polypeptide
SLEFQDFVNKCLIKNPAERADLKQLMVHAFIKRSDAEEVD

SEQ ID NO: 6843 - protein, 40 aa, Artificial Sequence
  Description of Artificial Sequence: Synthetic polypeptide
MEFQDFVNKCLIKNPAERADLKQLMVHAFIKRSDAEEVDF

SEQ ID NO: 6844 - protein, 40 aa, Artificial Sequence
  Description of Artificial Sequence: Synthetic polypeptide
FQDFVNKCLIKNPAERADLKQLMVHAFIKRSDAEEVDFAG

SEQ ID NO: 6845 - protein, 40 aa, Artificial Sequence
  Description of Artificial Sequence: Synthetic polypeptide
DFVNKCLIKNPAERADLKQLMVHAFIKRSDAEEVDFAGWL

SEQ ID NO: 6846 - protein, 40 aa, Artificial Sequence
  Description of Artificial Sequence: Synthetic polypeptide
FVNKCLIKNPAERADLKQLMVHAFIKRSDAEEVDFAGWLC

SEQ ID NO: 6847 - protein, 40 aa, Artificial Sequence
  Description of Artificial Sequence: Synthetic polypeptide
VNKCLIKNPAERADLKQLMVHAFIKRSDAEEVDFAGWLCS

SEQ ID NO: 6848 - protein, 40 aa, Artificial Sequence
  Description of Artificial Sequence: Synthetic polypeptide
NKCLIKNPAERADLKQLMVHAFIKRSDAEEVDFAGWLCST

SEQ ID NO: 6849 - protein, 40 aa, Artificial Sequence
  Description of Artificial Sequence: Synthetic polypeptide
ATEYIQYMRRKNHTHQQDIDDLKRQNALLEQQVRALEKAR

SEQ ID NO: 6850 - protein, 40 aa, Artificial Sequence
  Description of Artificial Sequence: Synthetic polypeptide
TNYPSSDNSLYTNAKGSTISAFDGGSDSSSESEPEEPQSR

SEQ ID NO: 6851 - protein, 40 aa, Artificial Sequence
  Description of Artificial Sequence: Synthetic polypeptide
PSSDNSLYTNAKGSTISAFDGGSDSSSESEPEEPQSRKKL

SEQ ID NO: 6852 - protein, 40 aa, Artificial Sequence
  Description of Artificial Sequence: Synthetic polypeptide
CNTNMSVPTDGAVTTSQIPASEQETLVRPKPLLLKLLKSV

SEQ ID NO: 6853 - protein, 40 aa, Artificial Sequence
  Description of Artificial Sequence: Synthetic polypeptide
QIPASEQETLVRPKPLLLKLLKSVGAQKDTYTMKEVLFYL

SEQ ID NO: 6854 - protein, 40 aa, Artificial Sequence
  Description of Artificial Sequence: Synthetic polypeptide
LLKLLKSVGAQKDTYTMKEVLFYLGQYIMTKRLYDEKQQH

SEQ ID NO: 6855 - protein, 40 aa, Artificial Sequence
  Description of Artificial Sequence: Synthetic polypeptide
VGAQKDTYTMKEVLFYLGQYIMTKRLYDEKQQHIVYCSND

SEQ ID NO: 6856 - protein, 40 aa, Artificial Sequence
  Description of Artificial Sequence: Synthetic polypeptide
GAQKDTYTMKEVLFYLGQYIMTKRLYDEKQQHIVYCSNDL

SEQ ID NO: 6857 - protein, 40 aa, Artificial Sequence
  Description of Artificial Sequence: Synthetic polypeptide
LFYLGQYIMTKRLYDEKQQHIVYCSNDLLGDLFGVPSFSV

SEQ ID NO: 6858 - protein, 40 aa, Artificial Sequence
  Description of Artificial Sequence: Synthetic polypeptide
FYLGQYIMTKRLYDEKQQHIVYCSNDLLGDLFGVPSFSVK

SEQ ID NO: 6859 - protein, 40 aa, Artificial Sequence
  Description of Artificial Sequence: Synthetic polypeptide
YLGQYIMTKRLYDEKQQHIVYCSNDLLGDLFGVPSFSVKE

SEQ ID NO: 6860 - protein, 40 aa, Artificial Sequence
  Description of Artificial Sequence: Synthetic polypeptide
GQYIMTKRLYDEKQQHIVYCSNDLLGDLFGVPSFSVKEHR

SEQ ID NO: 6861 - protein, 40 aa, Artificial Sequence
  Description of Artificial Sequence: Synthetic polypeptide
YIMTKRLYDEKQQHIVYCSNDLLGDLFGVPSFSVKEHRKI

SEQ ID NO: 6862 - protein, 40 aa, Artificial Sequence
  Description of Artificial Sequence: Synthetic polypeptide
IMTKRLYDEKQQHIVYCSNDLLGDLFGVPSFSVKEHRKIY

SEQ ID NO: 6863 - protein, 40 aa, Artificial Sequence
  Description of Artificial Sequence: Synthetic polypeptide
MTKRLYDEKQQHIVYCSNDLLGDLFGVPSFSVKEHRKIYT

SEQ ID NO: 6864 - protein, 40 aa, Artificial Sequence
  Description of Artificial Sequence: Synthetic polypeptide
TKRLYDEKQQHIVYCSNDLLGDLFGVPSFSVKEHRKIYTM

SEQ ID NO: 6865 - protein, 40 aa, Artificial Sequence
  Description of Artificial Sequence: Synthetic polypeptide
KRLYDEKQQHIVYCSNDLLGDLFGVPSFSVKEHRKIYTMI

SEQ ID NO: 6866 - protein, 40 aa, Artificial Sequence
  Description of Artificial Sequence: Synthetic polypeptide
DEKQQHIVYCSNDLLGDLFGVPSFSVKEHRKIYTMIYRNL

SEQ ID NO: 6867 - protein, 40 aa, Artificial Sequence
  Description of Artificial Sequence: Synthetic polypeptide
KQQHIVYCSNDLLGDLFGVPSFSVKEHRKIYTMIYRNLVV

SEQ ID NO: 6868 - protein, 40 aa, Artificial Sequence
  Description of Artificial Sequence: Synthetic polypeptide
QHIVYCSNDLLGDLFGVPSFSVKEHRKIYTMIYRNLVVVN

SEQ ID NO: 6869 - protein, 40 aa, Artificial Sequence
  Description of Artificial Sequence: Synthetic polypeptide
IVYCSNDLLGDLFGVPSFSVKEHRKIYTMIYRNLVVVNQQ

SEQ ID NO: 6870 - protein, 40 aa, Artificial Sequence
  Description of Artificial Sequence: Synthetic polypeptide
VYCSNDLLGDLFGVPSFSVKEHRKIYTMIYRNLVVVNQQE

SEQ ID NO: 6871 - protein, 40 aa, Artificial Sequence
  Description of Artificial Sequence: Synthetic polypeptide
LLGDLFGVPSFSVKEHRKIYTMIYRNLVVVNQQESSDSGT

SEQ ID NO: 6872 - protein, 40 aa, Artificial Sequence
  Description of Artificial Sequence: Synthetic polypeptide
GDLFGVPSFSVKEHRKIYTMIYRNLVVVNQQESSDSGTSV

SEQ ID NO: 6873 - protein, 40 aa, Artificial Sequence
  Description of Artificial Sequence: Synthetic polypeptide
DLFGVPSFSVKEHRKIYTMIYRNLVVVNQQESSDSGTSVS

SEQ ID NO: 6874 - protein, 40 aa, Artificial Sequence
  Description of Artificial Sequence: Synthetic polypeptide
FGVPSFSVKEHRKIYTMIYRNLVVVNQQESSDSGTSVSEN

SEQ ID NO: 6875 - protein, 40 aa, Artificial Sequence
  Description of Artificial Sequence: Synthetic polypeptide
PSFSVKEHRKIYTMIYRNLVVVNQQESSDSGTSVSENRCH

SEQ ID NO: 6876 - protein, 40 aa, Artificial Sequence
  Description of Artificial Sequence: Synthetic polypeptide
VKEHRKIYTMIYRNLVVVNQQESSDSGTSVSENRCHLEGG

SEQ ID NO: 6877 - protein, 40 aa, Artificial Sequence
  Description of Artificial Sequence: Synthetic polypeptide
IYRNLVVVNQQESSDSGTSVSENRCHLEGGSDQKDLVQEL

SEQ ID NO: 6878 - protein, 40 aa, Artificial Sequence
  Description of Artificial Sequence: Synthetic polypeptide
RNLVVVNQQESSDSGTSVSENRCHLEGGSDQKDLVQELQE

SEQ ID NO: 6879 - protein, 40 aa, Artificial Sequence
  Description of Artificial Sequence: Synthetic polypeptide
NQQESSDSGTSVSENRCHLEGGSDQKDLVQELQEEKPSSS

SEQ ID NO: 6880 - protein, 40 aa, Artificial Sequence
  Description of Artificial Sequence: Synthetic polypeptide
ESSDSGTSVSENRCHLEGGSDQKDLVQELQEEKPSSSHLV

SEQ ID NO: 6881 - protein, 40 aa, Artificial Sequence
  Description of Artificial Sequence: Synthetic polypeptide
SENRCHLEGGSDQKDLVQELQEEKPSSSHLVSRPSTSSRR

SEQ ID NO: 6882 - protein, 40 aa, Artificial Sequence
  Description of Artificial Sequence: Synthetic polypeptide
LEGGSDQKDLVQELQEEKPSSSHLVSRPSTSSRRRAISET

SEQ ID NO: 6883 - protein, 40 aa, Artificial Sequence
  Description of Artificial Sequence: Synthetic polypeptide
SDQKDLVQELQEEKPSSSHLVSRPSTSSRRRAISETEENS

SEQ ID NO: 6884 - protein, 40 aa, Artificial Sequence
  Description of Artificial Sequence: Synthetic polypeptide
QELQEEKPSSSHLVSRPSTSSRRRAISETEENSDELSGER

SEQ ID NO: 6885 - protein, 40 aa, Artificial Sequence
  Description of Artificial Sequence: Synthetic polypeptide
AISETEENSDELSGERQRKRHKSDSISLSFDESLALCVIR

SEQ ID NO: 6886 - protein, 40 aa, Artificial Sequence
  Description of Artificial Sequence: Synthetic polypeptide
ENSDELSGERQRKRHKSDSISLSFDESLALCVIREICCER

SEQ ID NO: 6887 - protein, 40 aa, Artificial Sequence
  Description of Artificial Sequence: Synthetic polypeptide
LSGERQRKRHKSDSISLSFDESLALCVIREICCERSSSSE

SEQ ID NO: 6888 - protein, 40 aa, Artificial Sequence
  Description of Artificial Sequence: Synthetic polypeptide
HKSDSISLSFDESLALCVIREICCERSSSSESTGTPSNPD

SEQ ID NO: 6889 - protein, 40 aa, Artificial Sequence
  Description of Artificial Sequence: Synthetic polypeptide
SLSFDESLALCVIREICCERSSSSESTGTPSNPDLDAGVS

SEQ ID NO: 6890 - protein, 40 aa, Artificial Sequence
  Description of Artificial Sequence: Synthetic polypeptide
ESLALCVIREICCERSSSSESTGTPSNPDLDAGVSEHSGD

SEQ ID NO: 6891 - protein, 40 aa, Artificial Sequence
  Description of Artificial Sequence: Synthetic polypeptide
MALCVIREICCERSSSSESTGTPSNPDLDAGVSEHSGDWL

SEQ ID NO: 6892 - protein, 40 aa, Artificial Sequence
  Description of Artificial Sequence: Synthetic polypeptide
ALCVIREICCERSSSSESTGTPSNPDLDAGVSEHSGDWLD

SEQ ID NO: 6893 - protein, 40 aa, Artificial Sequence
  Description of Artificial Sequence: Synthetic polypeptide
VIREICCERSSSSESTGTPSNPDLDAGVSEHSGDWLDQDS

SEQ ID NO: 6894 - protein, 40 aa, Artificial Sequence
  Description of Artificial Sequence: Synthetic polypeptide
CERSSSSESTGTPSNPDLDAGVSEHSGDWLDQDSVSDQFS

SEQ ID NO: 6895 - protein, 40 aa, Artificial Sequence
  Description of Artificial Sequence: Synthetic polypeptide
RSSSSESTGTPSNPDLDAGVSEHSGDWLDQDSVSDQFSVE

SEQ ID NO: 6896 - protein, 40 aa, Artificial Sequence
  Description of Artificial Sequence: Synthetic polypeptide
SSSSESTGTPSNPDLDAGVSEHSGDWLDQDSVSDQFSVEF

SEQ ID NO: 6897 - protein, 40 aa, Artificial Sequence
  Description of Artificial Sequence: Synthetic polypeptide
SSESTGTPSNPDLDAGVSEHSGDWLDQDSVSDQFSVEFEV

SEQ ID NO: 6898 - protein, 40 aa, Artificial Sequence
  Description of Artificial Sequence: Synthetic polypeptide
SESTGTPSNPDLDAGVSEHSGDWLDQDSVSDQFSVEFEVE

SEQ ID NO: 6899 - protein, 40 aa, Artificial Sequence
  Description of Artificial Sequence: Synthetic polypeptide
STGTPSNPDLDAGVSEHSGDWLDQDSVSDQFSVEFEVESL

SEQ ID NO: 6900 - protein, 40 aa, Artificial Sequence
  Description of Artificial Sequence: Synthetic polypeptide
TGTPSNPDLDAGVSEHSGDWLDQDSVSDQFSVEFEVESLD

SEQ ID NO: 6901 - protein, 40 aa, Artificial Sequence
  Description of Artificial Sequence: Synthetic polypeptide
SNPDLDAGVSEHSGDWLDQDSVSDQFSVEFEVESLDSEDY

SEQ ID NO: 6902 - protein, 40 aa, Artificial Sequence
  Description of Artificial Sequence: Synthetic polypeptide
NPDLDAGVSEHSGDWLDQDSVSDQFSVEFEVESLDSEDYS

SEQ ID NO: 6903 - protein, 40 aa, Artificial Sequence
  Description of Artificial Sequence: Synthetic polypeptide
PDLDAGVSEHSGDWLDQDSVSDQFSVEFEVESLDSEDYSL

SEQ ID NO: 6904 - protein, 40 aa, Artificial Sequence
  Description of Artificial Sequence: Synthetic polypeptide
DLDAGVSEHSGDWLDQDSVSDQFSVEFEVESLDSEDYSLS

SEQ ID NO: 6905 - protein, 40 aa, Artificial Sequence
  Description of Artificial Sequence: Synthetic polypeptide
GVSEHSGDWLDQDSVSDQFSVEFEVESLDSEDYSLSEEGQ

SEQ ID NO: 6906 - protein, 40 aa, Artificial Sequence
  Description of Artificial Sequence: Synthetic polypeptide
HSGDWLDQDSVSDQFSVEFEVESLDSEDYSLSEEGQELSD

SEQ ID NO: 6907 - protein, 40 aa, Artificial Sequence
  Description of Artificial Sequence: Synthetic polypeptide
DSVSDQFSVEFEVESLDSEDYSLSEEGQELSDEDDEVYQV

SEQ ID NO: 6908 - protein, 40 aa, Artificial Sequence
  Description of Artificial Sequence: Synthetic polypeptide
QFSVEFEVESLDSEDYSLSEEGQELSDEDDEVYQVTVYQA

SEQ ID NO: 6909 - protein, 40 aa, Artificial Sequence
  Description of Artificial Sequence: Synthetic polypeptide
ALRENWLPEDKGKDKGEISEKAKLENSTQAEEGFDVPDCK

SEQ ID NO: 6910 - protein, 40 aa, Artificial Sequence
  Description of Artificial Sequence: Synthetic polypeptide
LRENWLPEDKGKDKGEISEKAKLENSTQAEEGFDVPDCKK

SEQ ID NO: 6911 - protein, 40 aa, Artificial Sequence
  Description of Artificial Sequence: Synthetic polypeptide
RENWLPEDKGKDKGEISEKAKLENSTQAEEGFDVPDCKKT

SEQ ID NO: 6912 - protein, 40 aa, Artificial Sequence
  Description of Artificial Sequence: Synthetic polypeptide
ENWLPEDKGKDKGEISEKAKLENSTQAEEGFDVPDCKKTI

SEQ ID NO: 6913 - protein, 40 aa, Artificial Sequence
  Description of Artificial Sequence: Synthetic polypeptide
NWLPEDKGKDKGEISEKAKLENSTQAEEGFDVPDCKKTIV

SEQ ID NO: 6914 - protein, 40 aa, Artificial Sequence
  Description of Artificial Sequence: Synthetic polypeptide
EDKGKDKGEISEKAKLENSTQAEEGFDVPDCKKTIVNDSR

SEQ ID NO: 6915 - protein, 40 aa, Artificial Sequence
  Description of Artificial Sequence: Synthetic polypeptide
DKGKDKGEISEKAKLENSTQAEEGFDVPDCKKTIVNDSRE

SEQ ID NO: 6916 - protein, 40 aa, Artificial Sequence
  Description of Artificial Sequence: Synthetic polypeptide
KDKGEISEKAKLENSTQAEEGFDVPDCKKTIVNDSRESCV

SEQ ID NO: 6917 - protein, 40 aa, Artificial Sequence
  Description of Artificial Sequence: Synthetic polypeptide
DKGEISEKAKLENSTQAEEGFDVPDCKKTIVNDSRESCVE

SEQ ID NO: 6918 - protein, 40 aa, Artificial Sequence
  Description of Artificial Sequence: Synthetic polypeptide
EKAKLENSTQAEEGFDVPDCKKTIVNDSRESCVEENDDKI

SEQ ID NO: 6919 - protein, 40 aa, Artificial Sequence
  Description of Artificial Sequence: Synthetic polypeptide
AKLENSTQAEEGFDVPDCKKTIVNDSRESCVEENDDKITQ

SEQ ID NO: 6920 - protein, 40 aa, Artificial Sequence
  Description of Artificial Sequence: Synthetic polypeptide
MENSTQAEEGFDVPDCKKTIVNDSRESCVEENDDKITQAS

SEQ ID NO: 6921 - protein, 40 aa, Artificial Sequence
  Description of Artificial Sequence: Synthetic polypeptide
NSTQAEEGFDVPDCKKTIVNDSRESCVEENDDKITQASQS

SEQ ID NO: 6922 - protein, 40 aa, Artificial Sequence
  Description of Artificial Sequence: Synthetic polypeptide
STQAEEGFDVPDCKKTIVNDSRESCVEENDDKITQASQSQ

SEQ ID NO: 6923 - protein, 40 aa, Artificial Sequence
  Description of Artificial Sequence: Synthetic polypeptide
QAEEGFDVPDCKKTIVNDSRESCVEENDDKITQASQSQES

SEQ ID NO: 6924 - protein, 40 aa, Artificial Sequence
  Description of Artificial Sequence: Synthetic polypeptide
AEEGFDVPDCKKTIVNDSRESCVEENDDKITQASQSQESE

SEQ ID NO: 6925 - protein, 40 aa, Artificial Sequence
  Description of Artificial Sequence: Synthetic polypeptide
GFDVPDCKKTIVNDSRESCVEENDDKITQASQSQESEDYS

SEQ ID NO: 6926 - protein, 40 aa, Artificial Sequence
  Description of Artificial Sequence: Synthetic polypeptide
FDVPDCKKTIVNDSRESCVEENDDKITQASQSQESEDYSQ

SEQ ID NO: 6927 - protein, 40 aa, Artificial Sequence
  Description of Artificial Sequence: Synthetic polypeptide
DVPDCKKTIVNDSRESCVEENDDKITQASQSQESEDYSQP

SEQ ID NO: 6928 - protein, 40 aa, Artificial Sequence
  Description of Artificial Sequence: Synthetic polypeptide
VPDCKKTIVNDSRESCVEENDDKITQASQSQESEDYSQPS

SEQ ID NO: 6929 - protein, 40 aa, Artificial Sequence
  Description of Artificial Sequence: Synthetic polypeptide
ENDDKITQASQSQESEDYSQPSTSSSIIYSSQEDVKEFER

SEQ ID NO: 6930 - protein, 40 aa, Artificial Sequence
  Description of Artificial Sequence: Synthetic polypeptide
TQASQSQESEDYSQPSTSSSIIYSSQEDVKEFEREETQDK

SEQ ID NO: 6931 - protein, 40 aa, Artificial Sequence
  Description of Artificial Sequence: Synthetic polypeptide
ESEDYSQPSTSSSIIYSSQEDVKEFEREETQDKEESVESS

SEQ ID NO: 6932 - protein, 40 aa, Artificial Sequence
  Description of Artificial Sequence: Synthetic polypeptide
SQPSTSSSIIYSSQEDVKEFEREETQDKEESVESSLPLNA

SEQ ID NO: 6933 - protein, 40 aa, Artificial Sequence
  Description of Artificial Sequence: Synthetic polypeptide
PSTSSSIIYSSQEDVKEFEREETQDKEESVESSLPLNAIE

SEQ ID NO: 6934 - protein, 40 aa, Artificial Sequence
  Description of Artificial Sequence: Synthetic polypeptide
STSSSIIYSSQEDVKEFEREETQDKEESVESSLPLNAIEP

SEQ ID NO: 6935 - protein, 40 aa, Artificial Sequence
  Description of Artificial Sequence: Synthetic polypeptide
PLNAIEPCVICQGRPKNGCIVHGKTGHLMACFTCAKKLKK

SEQ ID NO: 6936 - protein, 40 aa, Artificial Sequence
  Description of Artificial Sequence: Synthetic polypeptide
VICQGRPKNGCIVHGKTGHLMACFTCAKKLKKRNKPCPVC

SEQ ID NO: 6937 - protein, 40 aa, Artificial Sequence
  Description of Artificial Sequence: Synthetic polypeptide
CQGRPKNGCIVHGKTGHLMACFTCAKKLKKRNKPCPVCRQ

SEQ ID NO: 6938 - protein, 40 aa, Artificial Sequence
  Description of Artificial Sequence: Synthetic polypeptide
RPKNGCIVHGKTGHLMACFTCAKKLKKRNKPCPVCRQPIQ

SEQ ID NO: 6939 - protein, 40 aa, Artificial Sequence
  Description of Artificial Sequence: Synthetic polypeptide
PKNGCIVHGKTGHLMACFTCAKKLKKRNKPCPVCRQPIQM

SEQ ID NO: 6940 - protein, 40 aa, Artificial Sequence
  Description of Artificial Sequence: Synthetic polypeptide
MTSFSTSAQCSTSDSACRISPGQINQVRPKLPLLKILHAA

SEQ ID NO: 6941 - protein, 40 aa, Artificial Sequence
  Description of Artificial Sequence: Synthetic polypeptide
SFSTSAQCSTSDSACRISPGQINQVRPKLPLLKILHAAGA

SEQ ID NO: 6942 - protein, 40 aa, Artificial Sequence
  Description of Artificial Sequence: Synthetic polypeptide
AQCSTSDSACRISPGQINQVRPKLPLLKILHAAGAQGEMF

SEQ ID NO: 6943 - protein, 40 aa, Artificial Sequence
  Description of Artificial Sequence: Synthetic polypeptide
CSTSDSACRISPGQINQVRPKLPLLKILHAAGAQGEMFTV

SEQ ID NO: 6944 - protein, 40 aa, Artificial Sequence
  Description of Artificial Sequence: Synthetic polypeptide
SDSACRISPGQINQVRPKLPLLKILHAAGAQGEMFTVKEV

SEQ ID NO: 6945 - protein, 40 aa, Artificial Sequence
  Description of Artificial Sequence: Synthetic polypeptide
DSACRISPGQINQVRPKLPLLKILHAAGAQGEMFTVKEVM

SEQ ID NO: 6946 - protein, 40 aa, Artificial Sequence
  Description of Artificial Sequence: Synthetic polypeptide
SACRISPGQINQVRPKLPLLKILHAAGAQGEMFTVKEVMH

SEQ ID NO: 6947 - protein, 40 aa, Artificial Sequence
  Description of Artificial Sequence: Synthetic polypeptide
ACRISPGQINQVRPKLPLLKILHAAGAQGEMFTVKEVMHY

SEQ ID NO: 6948 - protein, 40 aa, Artificial Sequence
  Description of Artificial Sequence: Synthetic polypeptide
ISPGQINQVRPKLPLLKILHAAGAQGEMFTVKEVMHYLGQ

SEQ ID NO: 6949 - protein, 40 aa, Artificial Sequence
  Description of Artificial Sequence: Synthetic polypeptide
SPGQINQVRPKLPLLKILHAAGAQGEMFTVKEVMHYLGQY

SEQ ID NO: 6950 - protein, 40 aa, Artificial Sequence
  Description of Artificial Sequence: Synthetic polypeptide
PGQINQVRPKLPLLKILHAAGAQGEMFTVKEVMHYLGQYI

SEQ ID NO: 6951 - protein, 40 aa, Artificial Sequence
  Description of Artificial Sequence: Synthetic polypeptide
GQINQVRPKLPLLKILHAAGAQGEMFTVKEVMHYLGQYIM

SEQ ID NO: 6952 - protein, 40 aa, Artificial Sequence
  Description of Artificial Sequence: Synthetic polypeptide
INQVRPKLPLLKILHAAGAQGEMFTVKEVMHYLGQYIMVK

SEQ ID NO: 6953 - protein, 40 aa, Artificial Sequence
  Description of Artificial Sequence: Synthetic polypeptide
NQVRPKLPLLKILHAAGAQGEMFTVKEVMHYLGQYIMVKQ

SEQ ID NO: 6954 - protein, 40 aa, Artificial Sequence
  Description of Artificial Sequence: Synthetic polypeptide
QVRPKLPLLKILHAAGAQGEMFTVKEVMHYLGQYIMVKQL

SEQ ID NO: 6955 - protein, 40 aa, Artificial Sequence
  Description of Artificial Sequence: Synthetic polypeptide
VRPKLPLLKILHAAGAQGEMFTVKEVMHYLGQYIMVKQLY

SEQ ID NO: 6956 - protein, 40 aa, Artificial Sequence
  Description of Artificial Sequence: Synthetic polypeptide
RPKLPLLKILHAAGAQGEMFTVKEVMHYLGQYIMVKQLYD

SEQ ID NO: 6957 - protein, 40 aa, Artificial Sequence
  Description of Artificial Sequence: Synthetic polypeptide
PKLPLLKILHAAGAQGEMFTVKEVMHYLGQYIMVKQLYDQ

SEQ ID NO: 6958 - protein, 40 aa, Artificial Sequence
  Description of Artificial Sequence: Synthetic polypeptide
KLPLLKILHAAGAQGEMFTVKEVMHYLGQYIMVKQLYDQQ

SEQ ID NO: 6959 - protein, 40 aa, Artificial Sequence
  Description of Artificial Sequence: Synthetic polypeptide
PLLKILHAAGAQGEMFTVKEVMHYLGQYIMVKQLYDQQEQ

SEQ ID NO: 6960 - protein, 40 aa, Artificial Sequence
  Description of Artificial Sequence: Synthetic polypeptide
MKILHAAGAQGEMFTVKEVMHYLGQYIMVKQLYDQQEQHM

SEQ ID NO: 6961 - protein, 40 aa, Artificial Sequence
  Description of Artificial Sequence: Synthetic polypeptide
KILHAAGAQGEMFTVKEVMHYLGQYIMVKQLYDQQEQHMV

SEQ ID NO: 6962 - protein, 40 aa, Artificial Sequence
  Description of Artificial Sequence: Synthetic polypeptide
ILHAAGAQGEMFTVKEVMHYLGQYIMVKQLYDQQEQHMVY

SEQ ID NO: 6963 - protein, 40 aa, Artificial Sequence
  Description of Artificial Sequence: Synthetic polypeptide
MHAAGAQGEMFTVKEVMHYLGQYIMVKQLYDQQEQHMVYC

SEQ ID NO: 6964 - protein, 40 aa, Artificial Sequence
  Description of Artificial Sequence: Synthetic polypeptide
AGAQGEMFTVKEVMHYLGQYIMVKQLYDQQEQHMVYCGGD

SEQ ID NO: 6965 - protein, 40 aa, Artificial Sequence
  Description of Artificial Sequence: Synthetic polypeptide
AQGEMFTVKEVMHYLGQYIMVKQLYDQQEQHMVYCGGDLL

SEQ ID NO: 6966 - protein, 40 aa, Artificial Sequence
  Description of Artificial Sequence: Synthetic polypeptide
GEMFTVKEVMHYLGQYIMVKQLYDQQEQHMVYCGGDLLGE

SEQ ID NO: 6967 - protein, 40 aa, Artificial Sequence
  Description of Artificial Sequence: Synthetic polypeptide
EMFTVKEVMHYLGQYIMVKQLYDQQEQHMVYCGGDLLGEL

SEQ ID NO: 6968 - protein, 40 aa, Artificial Sequence
  Description of Artificial Sequence: Synthetic polypeptide
FTVKEVMHYLGQYIMVKQLYDQQEQHMVYCGGDLLGELLG

SEQ ID NO: 6969 - protein, 40 aa, Artificial Sequence
  Description of Artificial Sequence: Synthetic polypeptide
VKEVMHYLGQYIMVKQLYDQQEQHMVYCGGDLLGELLGRQ

SEQ ID NO: 6970 - protein, 40 aa, Artificial Sequence
  Description of Artificial Sequence: Synthetic polypeptide
VMHYLGQYIMVKQLYDQQEQHMVYCGGDLLGELLGRQSFS

SEQ ID NO: 6971 - protein, 40 aa, Artificial Sequence
  Description of Artificial Sequence: Synthetic polypeptide
MVKQLYDQQEQHMVYCGGDLLGELLGRQSFSVKDPSPLYD

SEQ ID NO: 6972 - protein, 40 aa, Artificial Sequence
  Description of Artificial Sequence: Synthetic polypeptide
DQQEQHMVYCGGDLLGELLGRQSFSVKDPSPLYDMLRKNL

SEQ ID NO: 6973 - protein, 40 aa, Artificial Sequence
  Description of Artificial Sequence: Synthetic polypeptide
QQEQHMVYCGGDLLGELLGRQSFSVKDPSPLYDMLRKNLV

SEQ ID NO: 6974 - protein, 40 aa, Artificial Sequence
  Description of Artificial Sequence: Synthetic polypeptide
EQHMVYCGGDLLGELLGRQSFSVKDPSPLYDMLRKNLVTL

SEQ ID NO: 6975 - protein, 40 aa, Artificial Sequence
  Description of Artificial Sequence: Synthetic polypeptide
HMVYCGGDLLGELLGRQSFSVKDPSPLYDMLRKNLVTLAT

SEQ ID NO: 6976 - protein, 40 aa, Artificial Sequence
  Description of Artificial Sequence: Synthetic polypeptide
VYCGGDLLGELLGRQSFSVKDPSPLYDMLRKNLVTLATAT

SEQ ID NO: 6977 - protein, 40 aa, Artificial Sequence
  Description of Artificial Sequence: Synthetic polypeptide
PSPLYDMLRKNLVTLATATTDAAQTLALAQDHSMDIPSQD

SEQ ID NO: 6978 - protein, 40 aa, Artificial Sequence
  Description of Artificial Sequence: Synthetic polypeptide
LAQDHSMDIPSQDQLKQSAEESSTSRKRTTEDDIPTLPTS

SEQ ID NO: 6979 - protein, 40 aa, Artificial Sequence
  Description of Artificial Sequence: Synthetic polypeptide
DHSMDIPSQDQLKQSAEESSTSRKRTTEDDIPTLPTSEHK

SEQ ID NO: 6980 - protein, 40 aa, Artificial Sequence
  Description of Artificial Sequence: Synthetic polypeptide
SQDQLKQSAEESSTSRKRTTEDDIPTLPTSEHKCIHSRED

SEQ ID NO: 6981 - protein, 40 aa, Artificial Sequence
  Description of Artificial Sequence: Synthetic polypeptide
QLKQSAEESSTSRKRTTEDDIPTLPTSEHKCIHSREDEDL

SEQ ID NO: 6982 - protein, 40 aa, Artificial Sequence
  Description of Artificial Sequence: Synthetic polypeptide
KQSAEESSTSRKRTTEDDIPTLPTSEHKCIHSREDEDLIE

SEQ ID NO: 6983 - protein, 40 aa, Artificial Sequence
  Description of Artificial Sequence: Synthetic polypeptide
AEESSTSRKRTTEDDIPTLPTSEHKCIHSREDEDLIENLA

SEQ ID NO: 6984 - protein, 40 aa, Artificial Sequence
  Description of Artificial Sequence: Synthetic polypeptide
STSRKRTTEDDIPTLPTSEHKCIHSREDEDLIENLAQDET

SEQ ID NO: 6985 - protein, 40 aa, Artificial Sequence
  Description of Artificial Sequence: Synthetic polypeptide
TSRKRTTEDDIPTLPTSEHKCIHSREDEDLIENLAQDETS

SEQ ID NO: 6986 - protein, 40 aa, Artificial Sequence
  Description of Artificial Sequence: Synthetic polypeptide
RKRTTEDDIPTLPTSEHKCIHSREDEDLIENLAQDETSRL

SEQ ID NO: 6987 - protein, 40 aa, Artificial Sequence
  Description of Artificial Sequence: Synthetic polypeptide
DLGFEEWDVAGLPWWFLGNLRSNYTPRSNGSTDLQTNQDV

SEQ ID NO: 6988 - protein, 40 aa, Artificial Sequence
  Description of Artificial Sequence: Synthetic polypeptide
LGFEEWDVAGLPWWFLGNLRSNYTPRSNGSTDLQTNQDVG

SEQ ID NO: 6989 - protein, 40 aa, Artificial Sequence
  Description of Artificial Sequence: Synthetic polypeptide
GFEEWDVAGLPWWFLGNLRSNYTPRSNGSTDLQTNQDVGT

SEQ ID NO: 6990 - protein, 40 aa, Artificial Sequence
  Description of Artificial Sequence: Synthetic polypeptide
NYTPRSNGSTDLQTNQDVGTAIVSDTTDDLWFLNESVSEQ

SEQ ID NO: 6991 - protein, 40 aa, Artificial Sequence
  Description of Artificial Sequence: Synthetic polypeptide
YTPRSNGSTDLQTNQDVGTAIVSDTTDDLWFLNESVSEQL

SEQ ID NO: 6992 - protein, 40 aa, Artificial Sequence
  Description of Artificial Sequence: Synthetic polypeptide
GSTDLQTNQDVGTAIVSDTTDDLWFLNESVSEQLGVGIKV

SEQ ID NO: 6993 - protein, 40 aa, Artificial Sequence
  Description of Artificial Sequence: Synthetic polypeptide
QTNQDVGTAIVSDTTDDLWFLNESVSEQLGVGIKVEAADT

SEQ ID NO: 6994 - protein, 40 aa, Artificial Sequence
  Description of Artificial Sequence: Synthetic polypeptide
TNQDVGTAIVSDTTDDLWFLNESVSEQLGVGIKVEAADTE

SEQ ID NO: 6995 - protein, 40 aa, Artificial Sequence
  Description of Artificial Sequence: Synthetic polypeptide
NQDVGTAIVSDTTDDLWFLNESVSEQLGVGIKVEAADTEQ

SEQ ID NO: 6996 - protein, 40 aa, Artificial Sequence
  Description of Artificial Sequence: Synthetic polypeptide
AIVSDTTDDLWFLNESVSEQLGVGIKVEAADTEQTSEEVG

SEQ ID NO: 6997 - protein, 40 aa, Artificial Sequence
  Description of Artificial Sequence: Synthetic polypeptide
DTTDDLWFLNESVSEQLGVGIKVEAADTEQTSEEVGKVSD

SEQ ID NO: 6998 - protein, 40 aa, Artificial Sequence
  Description of Artificial Sequence: Synthetic polypeptide
TTDDLWFLNESVSEQLGVGIKVEAADTEQTSEEVGKVSDK

SEQ ID NO: 6999 - protein, 40 aa, Artificial Sequence
  Description of Artificial Sequence: Synthetic polypeptide
DLWFLNESVSEQLGVGIKVEAADTEQTSEEVGKVSDKKVI

SEQ ID NO: 7000 - protein, 40 aa, Artificial Sequence
  Description of Artificial Sequence: Synthetic polypeptide
NESVSEQLGVGIKVEAADTEQTSEEVGKVSDKKVIEVGKN

SEQ ID NO: 7001 - protein, 40 aa, Artificial Sequence
  Description of Artificial Sequence: Synthetic polypeptide
SVSEQLGVGIKVEAADTEQTSEEVGKVSDKKVIEVGKNDD

SEQ ID NO: 7002 - protein, 40 aa, Artificial Sequence
  Description of Artificial Sequence: Synthetic polypeptide
VEAADTEQTSEEVGKVSDKKVIEVGKNDDLEDSKSLSDDT

SEQ ID NO: 7003 - protein, 40 aa, Artificial Sequence
  Description of Artificial Sequence: Synthetic polypeptide
EAADTEQTSEEVGKVSDKKVIEVGKNDDLEDSKSLSDDTD

SEQ ID NO: 7004 - protein, 40 aa, Artificial Sequence
  Description of Artificial Sequence: Synthetic polypeptide
AADTEQTSEEVGKVSDKKVIEVGKNDDLEDSKSLSDDTDV

SEQ ID NO: 7005 - protein, 40 aa, Artificial Sequence
  Description of Artificial Sequence: Synthetic polypeptide
TEQTSEEVGKVSDKKVIEVGKNDDLEDSKSLSDDTDVEVT

SEQ ID NO: 7006 - protein, 40 aa, Artificial Sequence
  Description of Artificial Sequence: Synthetic polypeptide
QTSEEVGKVSDKKVIEVGKNDDLEDSKSLSDDTDVEVTSE

SEQ ID NO: 7007 - protein, 40 aa, Artificial Sequence
  Description of Artificial Sequence: Synthetic polypeptide
TSEEVGKVSDKKVIEVGKNDDLEDSKSLSDDTDVEVTSED

SEQ ID NO: 7008 - protein, 40 aa, Artificial Sequence
  Description of Artificial Sequence: Synthetic polypeptide
EVGKVSDKKVIEVGKNDDLEDSKSLSDDTDVEVTSEDEWQ

SEQ ID NO: 7009 - protein, 40 aa, Artificial Sequence
  Description of Artificial Sequence: Synthetic polypeptide
GKVSDKKVIEVGKNDDLEDSKSLSDDTDVEVTSEDEWQCT

SEQ ID NO: 7010 - protein, 40 aa, Artificial Sequence
  Description of Artificial Sequence: Synthetic polypeptide
KVSDKKVIEVGKNDDLEDSKSLSDDTDVEVTSEDEWQCTE

SEQ ID NO: 7011 - protein, 40 aa, Artificial Sequence
  Description of Artificial Sequence: Synthetic polypeptide
DKKVIEVGKNDDLEDSKSLSDDTDVEVTSEDEWQCTECKK

SEQ ID NO: 7012 - protein, 40 aa, Artificial Sequence
  Description of Artificial Sequence: Synthetic polypeptide
EVGKNDDLEDSKSLSDDTDVEVTSEDEWQCTECKKFNSPS

SEQ ID NO: 7013 - protein, 40 aa, Artificial Sequence
  Description of Artificial Sequence: Synthetic polypeptide
KNDDLEDSKSLSDDTDVEVTSEDEWQCTECKKFNSPSKRY

SEQ ID NO: 7014 - protein, 40 aa, Artificial Sequence
  Description of Artificial Sequence: Synthetic polypeptide
SKSLSDDTDVEVTSEDEWQCTECKKFNSPSKRYCFRCWAL

SEQ ID NO: 7015 - protein, 40 aa, Artificial Sequence
  Description of Artificial Sequence: Synthetic polypeptide
DTDVEVTSEDEWQCTECKKFNSPSKRYCFRCWALRKDWYS

SEQ ID NO: 7016 - protein, 40 aa, Artificial Sequence
  Description of Artificial Sequence: Synthetic polypeptide
DVEVTSEDEWQCTECKKFNSPSKRYCFRCWALRKDWYSDC

SEQ ID NO: 7017 - protein, 40 aa, Artificial Sequence
  Description of Artificial Sequence: Synthetic polypeptide
EVTSEDEWQCTECKKFNSPSKRYCFRCWALRKDWYSDCSK

SEQ ID NO: 7018 - protein, 40 aa, Artificial Sequence
  Description of Artificial Sequence: Synthetic polypeptide
TSEDEWQCTECKKFNSPSKRYCFRCWALRKDWYSDCSKLT

SEQ ID NO: 7019 - protein, 40 aa, Artificial Sequence
  Description of Artificial Sequence: Synthetic polypeptide
SEDEWQCTECKKFNSPSKRYCFRCWALRKDWYSDCSKLTH

SEQ ID NO: 7020 - protein, 40 aa, Artificial Sequence
  Description of Artificial Sequence: Synthetic polypeptide
WQCTECKKFNSPSKRYCFRCWALRKDWYSDCSKLTHSLST

SEQ ID NO: 7021 - protein, 40 aa, Artificial Sequence
  Description of Artificial Sequence: Synthetic polypeptide
CTECKKFNSPSKRYCFRCWALRKDWYSDCSKLTHSLSTSD

SEQ ID NO: 7022 - protein, 40 aa, Artificial Sequence
  Description of Artificial Sequence: Synthetic polypeptide
TECKKFNSPSKRYCFRCWALRKDWYSDCSKLTHSLSTSDI

SEQ ID NO: 7023 - protein, 40 aa, Artificial Sequence
  Description of Artificial Sequence: Synthetic polypeptide
CKKFNSPSKRYCFRCWALRKDWYSDCSKLTHSLSTSDITA

SEQ ID NO: 7024 - protein, 40 aa, Artificial Sequence
  Description of Artificial Sequence: Synthetic polypeptide
KKFNSPSKRYCFRCWALRKDWYSDCSKLTHSLSTSDITAI

SEQ ID NO: 7025 - protein, 40 aa, Artificial Sequence
  Description of Artificial Sequence: Synthetic polypeptide
KFNSPSKRYCFRCWALRKDWYSDCSKLTHSLSTSDITAIP

SEQ ID NO: 7026 - protein, 40 aa, Artificial Sequence
  Description of Artificial Sequence: Synthetic polypeptide
NSPSKRYCFRCWALRKDWYSDCSKLTHSLSTSDITAIPEK

SEQ ID NO: 7027 - protein, 40 aa, Artificial Sequence
  Description of Artificial Sequence: Synthetic polypeptide
SPSKRYCFRCWALRKDWYSDCSKLTHSLSTSDITAIPEKE

SEQ ID NO: 7028 - protein, 40 aa, Artificial Sequence
  Description of Artificial Sequence: Synthetic polypeptide
PSKRYCFRCWALRKDWYSDCSKLTHSLSTSDITAIPEKEN

SEQ ID NO: 7029 - protein, 40 aa, Artificial Sequence
  Description of Artificial Sequence: Synthetic polypeptide
RYCFRCWALRKDWYSDCSKLTHSLSTSDITAIPEKENEGN

SEQ ID NO: 7030 - protein, 40 aa, Artificial Sequence
  Description of Artificial Sequence: Synthetic polypeptide
TSDITAIPEKENEGNDVPDCRRTISAPVVRPKDAYIKKEN

SEQ ID NO: 7031 - protein, 40 aa, Artificial Sequence
  Description of Artificial Sequence: Synthetic polypeptide
SDITAIPEKENEGNDVPDCRRTISAPVVRPKDAYIKKENS

SEQ ID NO: 7032 - protein, 40 aa, Artificial Sequence
  Description of Artificial Sequence: Synthetic polypeptide
DITAIPEKENEGNDVPDCRRTISAPVVRPKDAYIKKENSK

SEQ ID NO: 7033 - protein, 40 aa, Artificial Sequence
  Description of Artificial Sequence: Synthetic polypeptide
ITAIPEKENEGNDVPDCRRTISAPVVRPKDAYIKKENSKL

SEQ ID NO: 7034 - protein, 40 aa, Artificial Sequence
  Description of Artificial Sequence: Synthetic polypeptide
PDCRRTISAPVVRPKDAYIKKENSKLFDPCNSVEFLDLAH

SEQ ID NO: 7035 - protein, 40 aa, Artificial Sequence
  Description of Artificial Sequence: Synthetic polypeptide
DCRRTISAPVVRPKDAYIKKENSKLFDPCNSVEFLDLAHS

SEQ ID NO: 7036 - protein, 40 aa, Artificial Sequence
  Description of Artificial Sequence: Synthetic polypeptide
CRRTISAPVVRPKDAYIKKENSKLFDPCNSVEFLDLAHSS

SEQ ID NO: 7037 - protein, 40 aa, Artificial Sequence
  Description of Artificial Sequence: Synthetic polypeptide
RTISAPVVRPKDAYIKKENSKLFDPCNSVEFLDLAHSSES

SEQ ID NO: 7038 - protein, 40 aa, Artificial Sequence
  Description of Artificial Sequence: Synthetic polypeptide
VRPKDAYIKKENSKLFDPCNSVEFLDLAHSSESQETISSM

SEQ ID NO: 7039 - protein, 40 aa, Artificial Sequence
  Description of Artificial Sequence: Synthetic polypeptide
RPKDAYIKKENSKLFDPCNSVEFLDLAHSSESQETISSMG

SEQ ID NO: 7040 - protein, 40 aa, Artificial Sequence
  Description of Artificial Sequence: Synthetic polypeptide
AYIKKENSKLFDPCNSVEFLDLAHSSESQETISSMGEQLD

SEQ ID NO: 7041 - protein, 40 aa, Artificial Sequence
  Description of Artificial Sequence: Synthetic polypeptide
IKKENSKLFDPCNSVEFLDLAHSSESQETISSMGEQLDNL

SEQ ID NO: 7042 - protein, 40 aa, Artificial Sequence
  Description of Artificial Sequence: Synthetic polypeptide
KKENSKLFDPCNSVEFLDLAHSSESQETISSMGEQLDNLS

SEQ ID NO: 7043 - protein, 40 aa, Artificial Sequence
  Description of Artificial Sequence: Synthetic polypeptide
QETISSMGEQLDNLSEQRTDTENMEDCQNLLKPCSLCEKR

SEQ ID NO: 7044 - protein, 40 aa, Artificial Sequence
  Description of Artificial Sequence: Synthetic polypeptide
NLLKPCSLCEKRPRDGNIIHGRTGHLVTCFHCARRLKKAG

SEQ ID NO: 7045 - protein, 40 aa, Artificial Sequence
  Description of Artificial Sequence: Synthetic polypeptide
KRPRDGNIIHGRTGHLVTCFHCARRLKKAGASCPICKKEI

SEQ ID NO: 7046 - protein, 40 aa, Artificial Sequence
  Description of Artificial Sequence: Synthetic polypeptide
RPRDGNIIHGRTGHLVTCFHCARRLKKAGASCPICKKEIQ

SEQ ID NO: 7047 - protein, 40 aa, Artificial Sequence
  Description of Artificial Sequence: Synthetic polypeptide
PRDGNIIHGRTGHLVTCFHCARRLKKAGASCPICKKEIQL

SEQ ID NO: 7048 - protein, 40 aa, Artificial Sequence
  Description of Artificial Sequence: Synthetic polypeptide
DGNIIHGRTGHLVTCFHCARRLKKAGASCPICKKEIQLVI

SEQ ID NO: 7049 - protein, 40 aa, Artificial Sequence
  Description of Artificial Sequence: Synthetic polypeptide
GNIIHGRTGHLVTCFHCARRLKKAGASCPICKKEIQLVIK

SEQ ID NO: 7050 - protein, 40 aa, Artificial Sequence
  Description of Artificial Sequence: Synthetic polypeptide
NIIHGRTGHLVTCFHCARRLKKAGASCPICKKEIQLVIKV

SEQ ID NO: 7051 - protein, 40 aa, Artificial Sequence
  Description of Artificial Sequence: Synthetic polypeptide
IIHGRTGHLVTCFHCARRLKKAGASCPICKKEIQLVIKVF

SEQ ID NO: 7052 - protein, 40 aa, Artificial Sequence
  Description of Artificial Sequence: Synthetic polypeptide
IHGRTGHLVTCFHCARRLKKAGASCPICKKEIQLVIKVFI

SEQ ID NO: 7053 - protein, 40 aa, Artificial Sequence
  Description of Artificial Sequence: Synthetic polypeptide
MKAPAVLAPGILVLLFTLVQRSNGECKEALAKSEMNVNMK

SEQ ID NO: 7054 - protein, 40 aa, Artificial Sequence
  Description of Artificial Sequence: Synthetic polypeptide
SEMNVNMKYQLPNFTAETPIQNVILHEHHIFLGATNYIYV

SEQ ID NO: 7055 - protein, 40 aa, Artificial Sequence
  Description of Artificial Sequence: Synthetic polypeptide
QRHVFPHNHTADIQSEVHCIFSPQIEEPSQCPDCVVSALG

SEQ ID NO: 7056 - protein, 40 aa, Artificial Sequence
  Description of Artificial Sequence: Synthetic polypeptide
VFPHNHTADIQSEVHCIFSPQIEEPSQCPDCVVSALGAKV

SEQ ID NO: 7057 - protein, 40 aa, Artificial Sequence
  Description of Artificial Sequence: Synthetic polypeptide
EVHCIFSPQIEEPSQCPDCVVSALGAKVLSSVKDRFINFF

SEQ ID NO: 7058 - protein, 40 aa, Artificial Sequence
  Description of Artificial Sequence: Synthetic polypeptide
VHCIFSPQIEEPSQCPDCVVSALGAKVLSSVKDRFINFFV

SEQ ID NO: 7059 - protein, 40 aa, Artificial Sequence
  Description of Artificial Sequence: Synthetic polypeptide
CIFSPQIEEPSQCPDCVVSALGAKVLSSVKDRFINFFVGN

SEQ ID NO: 7060 - protein, 40 aa, Artificial Sequence
  Description of Artificial Sequence: Synthetic polypeptide
IFSPQIEEPSQCPDCVVSALGAKVLSSVKDRFINFFVGNT

SEQ ID NO: 7061 - protein, 40 aa, Artificial Sequence
  Description of Artificial Sequence: Synthetic polypeptide
FSPQIEEPSQCPDCVVSALGAKVLSSVKDRFINFFVGNTI

SEQ ID NO: 7062 - protein, 40 aa, Artificial Sequence
  Description of Artificial Sequence: Synthetic polypeptide
SPQIEEPSQCPDCVVSALGAKVLSSVKDRFINFFVGNTIN

SEQ ID NO: 7063 - protein, 40 aa, Artificial Sequence
  Description of Artificial Sequence: Synthetic polypeptide
PQIEEPSQCPDCVVSALGAKVLSSVKDRFINFFVGNTINS

SEQ ID NO: 7064 - protein, 40 aa, Artificial Sequence
  Description of Artificial Sequence: Synthetic polypeptide
IEEPSQCPDCVVSALGAKVLSSVKDRFINFFVGNTINSSY

SEQ ID NO: 7065 - protein, 40 aa, Artificial Sequence
  Description of Artificial Sequence: Synthetic polypeptide
EPSQCPDCVVSALGAKVLSSVKDRFINFFVGNTINSSYFP

SEQ ID NO: 7066 - protein, 40 aa, Artificial Sequence
  Description of Artificial Sequence: Synthetic polypeptide
PSQCPDCVVSALGAKVLSSVKDRFINFFVGNTINSSYFPD

SEQ ID NO: 7067 - protein, 40 aa, Artificial Sequence
  Description of Artificial Sequence: Synthetic polypeptide
SQCPDCVVSALGAKVLSSVKDRFINFFVGNTINSSYFPDH

SEQ ID NO: 7068 - protein, 40 aa, Artificial Sequence
  Description of Artificial Sequence: Synthetic polypeptide
QCPDCVVSALGAKVLSSVKDRFINFFVGNTINSSYFPDHP

SEQ ID NO: 7069 - protein, 40 aa, Artificial Sequence
  Description of Artificial Sequence: Synthetic polypeptide
PDCVVSALGAKVLSSVKDRFINFFVGNTINSSYFPDHPLH

SEQ ID NO: 7070 - protein, 40 aa, Artificial Sequence
  Description of Artificial Sequence: Synthetic polypeptide
DCVVSALGAKVLSSVKDRFINFFVGNTINSSYFPDHPLHS

SEQ ID NO: 7071 - protein, 40 aa, Artificial Sequence
  Description of Artificial Sequence: Synthetic polypeptide
CVVSALGAKVLSSVKDRFINFFVGNTINSSYFPDHPLHSI

SEQ ID NO: 7072 - protein, 40 aa, Artificial Sequence
  Description of Artificial Sequence: Synthetic polypeptide
VSALGAKVLSSVKDRFINFFVGNTINSSYFPDHPLHSISV

SEQ ID NO: 7073 - protein, 40 aa, Artificial Sequence
  Description of Artificial Sequence: Synthetic polypeptide
SALGAKVLSSVKDRFINFFVGNTINSSYFPDHPLHSISVR

SEQ ID NO: 7074 - protein, 40 aa, Artificial Sequence
  Description of Artificial Sequence: Synthetic polypeptide
VLSSVKDRFINFFVGNTINSSYFPDHPLHSISVRRLKETK

SEQ ID NO: 7075 - protein, 40 aa, Artificial Sequence
  Description of Artificial Sequence: Synthetic polypeptide
FINFFVGNTINSSYFPDHPLHSISVRRLKETKDGFMFLTD

SEQ ID NO: 7076 - protein, 40 aa, Artificial Sequence
  Description of Artificial Sequence: Synthetic polypeptide
LKETKDGFMFLTDQSYIDVLPEFRDSYPIKYVHAFESNNF

SEQ ID NO: 7077 - protein, 40 aa, Artificial Sequence
  Description of Artificial Sequence: Synthetic polypeptide
KETKDGFMFLTDQSYIDVLPEFRDSYPIKYVHAFESNNFI

SEQ ID NO: 7078 - protein, 40 aa, Artificial Sequence
  Description of Artificial Sequence: Synthetic polypeptide
ETKDGFMFLTDQSYIDVLPEFRDSYPIKYVHAFESNNFIY

SEQ ID NO: 7079 - protein, 40 aa, Artificial Sequence
  Description of Artificial Sequence: Synthetic polypeptide
KDGFMFLTDQSYIDVLPEFRDSYPIKYVHAFESNNFIYFL

SEQ ID NO: 7080 - protein, 40 aa, Artificial Sequence
  Description of Artificial Sequence: Synthetic polypeptide
DGFMFLTDQSYIDVLPEFRDSYPIKYVHAFESNNFIYFLT

SEQ ID NO: 7081 - protein, 40 aa, Artificial Sequence
  Description of Artificial Sequence: Synthetic polypeptide
GFMFLTDQSYIDVLPEFRDSYPIKYVHAFESNNFIYFLTV

SEQ ID NO: 7082 - protein, 40 aa, Artificial Sequence
  Description of Artificial Sequence: Synthetic polypeptide
MFLTDQSYIDVLPEFRDSYPIKYVHAFESNNFIYFLTVQR

SEQ ID NO: 7083 - protein, 40 aa, Artificial Sequence
  Description of Artificial Sequence: Synthetic polypeptide
TDQSYIDVLPEFRDSYPIKYVHAFESNNFIYFLTVQRETL

SEQ ID NO: 7084 - protein, 40 aa, Artificial Sequence
  Description of Artificial Sequence: Synthetic polypeptide
DQSYIDVLPEFRDSYPIKYVHAFESNNFIYFLTVQRETLD

SEQ ID NO: 7085 - protein, 40 aa, Artificial Sequence
  Description of Artificial Sequence: Synthetic polypeptide
QSYIDVLPEFRDSYPIKYVHAFESNNFIYFLTVQRETLDA

SEQ ID NO: 7086 - protein, 40 aa, Artificial Sequence
  Description of Artificial Sequence: Synthetic polypeptide
SYIDVLPEFRDSYPIKYVHAFESNNFIYFLTVQRETLDAQ

SEQ ID NO: 7087 - protein, 40 aa, Artificial Sequence
  Description of Artificial Sequence: Synthetic polypeptide
IDVLPEFRDSYPIKYVHAFESNNFIYFLTVQRETLDAQTF

SEQ ID NO: 7088 - protein, 40 aa, Artificial Sequence
  Description of Artificial Sequence: Synthetic polypeptide
DVLPEFRDSYPIKYVHAFESNNFIYFLTVQRETLDAQTFH

SEQ ID NO: 7089 - protein, 40 aa, Artificial Sequence
  Description of Artificial Sequence: Synthetic polypeptide
LPEFRDSYPIKYVHAFESNNFIYFLTVQRETLDAQTFHTR

SEQ ID NO: 7090 - protein, 40 aa, Artificial Sequence
  Description of Artificial Sequence: Synthetic polypeptide
PEFRDSYPIKYVHAFESNNFIYFLTVQRETLDAQTFHTRI

SEQ ID NO: 7091 - protein, 40 aa, Artificial Sequence
  Description of Artificial Sequence: Synthetic polypeptide
EFRDSYPIKYVHAFESNNFIYFLTVQRETLDAQTFHTRII

SEQ ID NO: 7092 - protein, 40 aa, Artificial Sequence
  Description of Artificial Sequence: Synthetic polypeptide
DSYPIKYVHAFESNNFIYFLTVQRETLDAQTFHTRIIRFC

SEQ ID NO: 7093 - protein, 40 aa, Artificial Sequence
  Description of Artificial Sequence: Synthetic polypeptide
SYPIKYVHAFESNNFIYFLTVQRETLDAQTFHTRIIRFCS

SEQ ID NO: 7094 - protein, 40 aa, Artificial Sequence
  Description of Artificial Sequence: Synthetic polypeptide
YPIKYVHAFESNNFIYFLTVQRETLDAQTFHTRIIRFCSI

SEQ ID NO: 7095 - protein, 40 aa, Artificial Sequence
  Description of Artificial Sequence: Synthetic polypeptide
PIKYVHAFESNNFIYFLTVQRETLDAQTFHTRIIRFCSIN

SEQ ID NO: 7096 - protein, 40 aa, Artificial Sequence
  Description of Artificial Sequence: Synthetic polypeptide
KYVHAFESNNFIYFLTVQRETLDAQTFHTRIIRFCSINSG

SEQ ID NO: 7097 - protein, 40 aa, Artificial Sequence
  Description of Artificial Sequence: Synthetic polypeptide
YVHAFESNNFIYFLTVQRETLDAQTFHTRIIRFCSINSGL

SEQ ID NO: 7098 - protein, 40 aa, Artificial Sequence
  Description of Artificial Sequence: Synthetic polypeptide
VHAFESNNFIYFLTVQRETLDAQTFHTRIIRFCSINSGLH

SEQ ID NO: 7099 - protein, 40 aa, Artificial Sequence
  Description of Artificial Sequence: Synthetic polypeptide
HAFESNNFIYFLTVQRETLDAQTFHTRIIRFCSINSGLHS

SEQ ID NO: 7100 - protein, 40 aa, Artificial Sequence
  Description of Artificial Sequence: Synthetic polypeptide
FESNNFIYFLTVQRETLDAQTFHTRIIRFCSINSGLHSYM

SEQ ID NO: 7101 - protein, 40 aa, Artificial Sequence
  Description of Artificial Sequence: Synthetic polypeptide
NNFIYFLTVQRETLDAQTFHTRIIRFCSINSGLHSYMEMP

SEQ ID NO: 7102 - protein, 40 aa, Artificial Sequence
  Description of Artificial Sequence: Synthetic polypeptide
NFIYFLTVQRETLDAQTFHTRIIRFCSINSGLHSYMEMPL

SEQ ID NO: 7103 - protein, 40 aa, Artificial Sequence
  Description of Artificial Sequence: Synthetic polypeptide
FIYFLTVQRETLDAQTFHTRIIRFCSINSGLHSYMEMPLE

SEQ ID NO: 7104 - protein, 40 aa, Artificial Sequence
  Description of Artificial Sequence: Synthetic polypeptide
VQRETLDAQTFHTRIIRFCSINSGLHSYMEMPLECILTEK

SEQ ID NO: 7105 - protein, 40 aa, Artificial Sequence
  Description of Artificial Sequence: Synthetic polypeptide
RETLDAQTFHTRIIRFCSINSGLHSYMEMPLECILTEKRK

SEQ ID NO: 7106 - protein, 40 aa, Artificial Sequence
  Description of Artificial Sequence: Synthetic polypeptide
TLDAQTFHTRIIRFCSINSGLHSYMEMPLECILTEKRKKR

SEQ ID NO: 7107 - protein, 40 aa, Artificial Sequence
  Description of Artificial Sequence: Synthetic polypeptide
LDAQTFHTRIIRFCSINSGLHSYMEMPLECILTEKRKKRS

SEQ ID NO: 7108 - protein, 40 aa, Artificial Sequence
  Description of Artificial Sequence: Synthetic polypeptide
QTFHTRIIRFCSINSGLHSYMEMPLECILTEKRKKRSTKK

SEQ ID NO: 7109 - protein, 40 aa, Artificial Sequence
  Description of Artificial Sequence: Synthetic polypeptide
FHTRIIRFCSINSGLHSYMEMPLECILTEKRKKRSTKKEV

SEQ ID NO: 7110 - protein, 40 aa, Artificial Sequence
  Description of Artificial Sequence: Synthetic polypeptide
IIRFCSINSGLHSYMEMPLECILTEKRKKRSTKKEVFNIL

SEQ ID NO: 7111 - protein, 40 aa, Artificial Sequence
  Description of Artificial Sequence: Synthetic polypeptide
FCSINSGLHSYMEMPLECILTEKRKKRSTKKEVFNILQAA

SEQ ID NO: 7112 - protein, 40 aa, Artificial Sequence
  Description of Artificial Sequence: Synthetic polypeptide
INSGLHSYMEMPLECILTEKRKKRSTKKEVFNILQAAYVS

SEQ ID NO: 7113 - protein, 40 aa, Artificial Sequence
  Description of Artificial Sequence: Synthetic polypeptide
MHSYMEMPLECILTEKRKKRSTKKEVFNILQAAYVSKPGA

SEQ ID NO: 7114 - protein, 40 aa, Artificial Sequence
  Description of Artificial Sequence: Synthetic polypeptide
HSYMEMPLECILTEKRKKRSTKKEVFNILQAAYVSKPGAQ

SEQ ID NO: 7115 - protein, 40 aa, Artificial Sequence
  Description of Artificial Sequence: Synthetic polypeptide
SYMEMPLECILTEKRKKRSTKKEVFNILQAAYVSKPGAQL

SEQ ID NO: 7116 - protein, 40 aa, Artificial Sequence
  Description of Artificial Sequence: Synthetic polypeptide
YMEMPLECILTEKRKKRSTKKEVFNILQAAYVSKPGAQLA

SEQ ID NO: 7117 - protein, 40 aa, Artificial Sequence
  Description of Artificial Sequence: Synthetic polypeptide
MEMPLECILTEKRKKRSTKKEVFNILQAAYVSKPGAQLAR

SEQ ID NO: 7118 - protein, 40 aa, Artificial Sequence
  Description of Artificial Sequence: Synthetic polypeptide
EMPLECILTEKRKKRSTKKEVFNILQAAYVSKPGAQLARQ

SEQ ID NO: 7119 - protein, 40 aa, Artificial Sequence
  Description of Artificial Sequence: Synthetic polypeptide
MPLECILTEKRKKRSTKKEVFNILQAAYVSKPGAQLARQI

SEQ ID NO: 7120 - protein, 40 aa, Artificial Sequence
  Description of Artificial Sequence: Synthetic polypeptide
PLECILTEKRKKRSTKKEVFNILQAAYVSKPGAQLARQIG

SEQ ID NO: 7121 - protein, 40 aa, Artificial Sequence
  Description of Artificial Sequence: Synthetic polypeptide
ECILTEKRKKRSTKKEVFNILQAAYVSKPGAQLARQIGAS

SEQ ID NO: 7122 - protein, 40 aa, Artificial Sequence
  Description of Artificial Sequence: Synthetic polypeptide
CILTEKRKKRSTKKEVFNILQAAYVSKPGAQLARQIGASL

SEQ ID NO: 7123 - protein, 40 aa, Artificial Sequence
  Description of Artificial Sequence: Synthetic polypeptide
ILTEKRKKRSTKKEVFNILQAAYVSKPGAQLARQIGASLN

SEQ ID NO: 7124 - protein, 40 aa, Artificial Sequence
  Description of Artificial Sequence: Synthetic polypeptide
LTEKRKKRSTKKEVFNILQAAYVSKPGAQLARQIGASLND

SEQ ID NO: 7125 - protein, 40 aa, Artificial Sequence
  Description of Artificial Sequence: Synthetic polypeptide
TEKRKKRSTKKEVFNILQAAYVSKPGAQLARQIGASLNDD

SEQ ID NO: 7126 - protein, 40 aa, Artificial Sequence
  Description of Artificial Sequence: Synthetic polypeptide
EKRKKRSTKKEVFNILQAAYVSKPGAQLARQIGASLNDDI

SEQ ID NO: 7127 - protein, 40 aa, Artificial Sequence
  Description of Artificial Sequence: Synthetic polypeptide
KRKKRSTKKEVFNILQAAYVSKPGAQLARQIGASLNDDIL

SEQ ID NO: 7128 - protein, 40 aa, Artificial Sequence
  Description of Artificial Sequence: Synthetic polypeptide
KKRSTKKEVFNILQAAYVSKPGAQLARQIGASLNDDILFG

SEQ ID NO: 7129 - protein, 40 aa, Artificial Sequence
  Description of Artificial Sequence: Synthetic polypeptide
HFYGPNHEHCFNRTLLRNSSGCEARRDEYRTEFTTALQRV

SEQ ID NO: 7130 - protein, 40 aa, Artificial Sequence
  Description of Artificial Sequence: Synthetic polypeptide
YRTEFTTALQRVDLFMGQFSEVLLTSISTFIKGDLTIANL

SEQ ID NO: 7131 - protein, 40 aa, Artificial Sequence
  Description of Artificial Sequence: Synthetic polypeptide
RVDLFMGQFSEVLLTSISTFIKGDLTIANLGTSEGRFMQV

SEQ ID NO: 7132 - protein, 40 aa, Artificial Sequence
  Description of Artificial Sequence: Synthetic polypeptide
EGRFMQVVVSRSGPSTPHVNFLLDSHPVSPEVIVEHTLNQ

SEQ ID NO: 7133 - protein, 40 aa, Artificial Sequence
  Description of Artificial Sequence: Synthetic polypeptide
QICLPAIYKVFPNSAPLEGGTRLTICGWDFGFRRNNKFDL

SEQ ID NO: 7134 - protein, 40 aa, Artificial Sequence
  Description of Artificial Sequence: Synthetic polypeptide
ICLPAIYKVFPNSAPLEGGTRLTICGWDFGFRRNNKFDLK

SEQ ID NO: 7135 - protein, 40 aa, Artificial Sequence
  Description of Artificial Sequence: Synthetic polypeptide
IYKVFPNSAPLEGGTRLTICGWDFGFRRNNKFDLKKTRVL

SEQ ID NO: 7136 - protein, 40 aa, Artificial Sequence
  Description of Artificial Sequence: Synthetic polypeptide
YKVFPNSAPLEGGTRLTICGWDFGFRRNNKFDLKKTRVLL

SEQ ID NO: 7137 - protein, 40 aa, Artificial Sequence
  Description of Artificial Sequence: Synthetic polypeptide
KVFPNSAPLEGGTRLTICGWDFGFRRNNKFDLKKTRVLLG

SEQ ID NO: 7138 - protein, 40 aa, Artificial Sequence
  Description of Artificial Sequence: Synthetic polypeptide
VFPNSAPLEGGTRLTICGWDFGFRRNNKFDLKKTRVLLGN

SEQ ID NO: 7139 - protein, 40 aa, Artificial Sequence
  Description of Artificial Sequence: Synthetic polypeptide
FPNSAPLEGGTRLTICGWDFGFRRNNKFDLKKTRVLLGNE

SEQ ID NO: 7140 - protein, 40 aa, Artificial Sequence
  Description of Artificial Sequence: Synthetic polypeptide
PNSAPLEGGTRLTICGWDFGFRRNNKFDLKKTRVLLGNES

SEQ ID NO: 7141 - protein, 40 aa, Artificial Sequence
  Description of Artificial Sequence: Synthetic polypeptide
NSAPLEGGTRLTICGWDFGFRRNNKFDLKKTRVLLGNESC

SEQ ID NO: 7142 - protein, 40 aa, Artificial Sequence
  Description of Artificial Sequence: Synthetic polypeptide
SAPLEGGTRLTICGWDFGFRRNNKFDLKKTRVLLGNESCT

SEQ ID NO: 7143 - protein, 40 aa, Artificial Sequence
  Description of Artificial Sequence: Synthetic polypeptide
LEGGTRLTICGWDFGFRRNNKFDLKKTRVLLGNESCTLTL

SEQ ID NO: 7144 - protein, 40 aa, Artificial Sequence
  Description of Artificial Sequence: Synthetic polypeptide
GTRLTICGWDFGFRRNNKFDLKKTRVLLGNESCTLTLSES

SEQ ID NO: 7145 - protein, 40 aa, Artificial Sequence
  Description of Artificial Sequence: Synthetic polypeptide
TRLTICGWDFGFRRNNKFDLKKTRVLLGNESCTLTLSEST

SEQ ID NO: 7146 - protein, 40 aa, Artificial Sequence
  Description of Artificial Sequence: Synthetic polypeptide
RLTICGWDFGFRRNNKFDLKKTRVLLGNESCTLTLSESTM

SEQ ID NO: 7147 - protein, 40 aa, Artificial Sequence
  Description of Artificial Sequence: Synthetic polypeptide
MTICGWDFGFRRNNKFDLKKTRVLLGNESCTLTLSESTMN

SEQ ID NO: 7148 - protein, 40 aa, Artificial Sequence
  Description of Artificial Sequence: Synthetic polypeptide
GWDFGFRRNNKFDLKKTRVLLGNESCTLTLSESTMNTLKC

SEQ ID NO: 7149 - protein, 40 aa, Artificial Sequence
  Description of Artificial Sequence: Synthetic polypeptide
FGFRRNNKFDLKKTRVLLGNESCTLTLSESTMNTLKCTVG

SEQ ID NO: 7150 - protein, 40 aa, Artificial Sequence
  Description of Artificial Sequence: Synthetic polypeptide
GFRRNNKFDLKKTRVLLGNESCTLTLSESTMNTLKCTVGP

SEQ ID NO: 7151 - protein, 40 aa, Artificial Sequence
  Description of Artificial Sequence: Synthetic polypeptide
FRRNNKFDLKKTRVLLGNESCTLTLSESTMNTLKCTVGPA

SEQ ID NO: 7152 - protein, 40 aa, Artificial Sequence
  Description of Artificial Sequence: Synthetic polypeptide
RRNNKFDLKKTRVLLGNESCTLTLSESTMNTLKCTVGPAM

SEQ ID NO: 7153 - protein, 40 aa, Artificial Sequence
  Description of Artificial Sequence: Synthetic polypeptide
RNNKFDLKKTRVLLGNESCTLTLSESTMNTLKCTVGPAMN

SEQ ID NO: 7154 - protein, 40 aa, Artificial Sequence
  Description of Artificial Sequence: Synthetic polypeptide
NNKFDLKKTRVLLGNESCTLTLSESTMNTLKCTVGPAMNK

SEQ ID NO: 7155 - protein, 40 aa, Artificial Sequence
  Description of Artificial Sequence: Synthetic polypeptide
NKFDLKKTRVLLGNESCTLTLSESTMNTLKCTVGPAMNKH

SEQ ID NO: 7156 - protein, 40 aa, Artificial Sequence
  Description of Artificial Sequence: Synthetic polypeptide
KFDLKKTRVLLGNESCTLTLSESTMNTLKCTVGPAMNKHF

SEQ ID NO: 7157 - protein, 40 aa, Artificial Sequence
  Description of Artificial Sequence: Synthetic polypeptide
VLLGNESCTLTLSESTMNTLKCTVGPAMNKHFNMSIIISN

SEQ ID NO: 7158 - protein, 40 aa, Artificial Sequence
  Description of Artificial Sequence: Synthetic polypeptide
GHGTTQYSTFSYVDPVITSISPKYGPMAGGTLLTLTGNYL

SEQ ID NO: 7159 - protein, 40 aa, Artificial Sequence
  Description of Artificial Sequence: Synthetic polypeptide
GTTQYSTFSYVDPVITSISPKYGPMAGGTLLTLTGNYLNS

SEQ ID NO: 7160 - protein, 40 aa, Artificial Sequence
  Description of Artificial Sequence: Synthetic polypeptide
TFSYVDPVITSISPKYGPMAGGTLLTLTGNYLNSGNSRHI

SEQ ID NO: 7161 - protein, 40 aa, Artificial Sequence
  Description of Artificial Sequence: Synthetic polypeptide
FSYVDPVITSISPKYGPMAGGTLLTLTGNYLNSGNSRHIS

SEQ ID NO: 7162 - protein, 40 aa, Artificial Sequence
  Description of Artificial Sequence: Synthetic polypeptide
SYVDPVITSISPKYGPMAGGTLLTLTGNYLNSGNSRHISI

SEQ ID NO: 7163 - protein, 40 aa, Artificial Sequence
  Description of Artificial Sequence: Synthetic polypeptide
PVITSISPKYGPMAGGTLLTLTGNYLNSGNSRHISIGGKT

SEQ ID NO: 7164 - protein, 40 aa, Artificial Sequence
  Description of Artificial Sequence: Synthetic polypeptide
TSISPKYGPMAGGTLLTLTGNYLNSGNSRHISIGGKTCTL

SEQ ID NO: 7165 - protein, 40 aa, Artificial Sequence
  Description of Artificial Sequence: Synthetic polypeptide
SISPKYGPMAGGTLLTLTGNYLNSGNSRHISIGGKTCTLK

SEQ ID NO: 7166 - protein, 40 aa, Artificial Sequence
  Description of Artificial Sequence: Synthetic polypeptide
PKYGPMAGGTLLTLTGNYLNSGNSRHISIGGKTCTLKSVS

SEQ ID NO: 7167 - protein, 40 aa, Artificial Sequence
  Description of Artificial Sequence: Synthetic polypeptide
MAGGTLLTLTGNYLNSGNSRHISIGGKTCTLKSVSNSILE

SEQ ID NO: 7168 - protein, 40 aa, Artificial Sequence
  Description of Artificial Sequence: Synthetic polypeptide
AGGTLLTLTGNYLNSGNSRHISIGGKTCTLKSVSNSILEC

SEQ ID NO: 7169 - protein, 40 aa, Artificial Sequence
  Description of Artificial Sequence: Synthetic polypeptide
TLLTLTGNYLNSGNSRHISIGGKTCTLKSVSNSILECYTP

SEQ ID NO: 7170 - protein, 40 aa, Artificial Sequence
  Description of Artificial Sequence: Synthetic polypeptide
LLTLTGNYLNSGNSRHISIGGKTCTLKSVSNSILECYTPA

SEQ ID NO: 7171 - protein, 40 aa, Artificial Sequence
  Description of Artificial Sequence: Synthetic polypeptide
NSRHISIGGKTCTLKSVSNSILECYTPAQTISTEFAVKLK

SEQ ID NO: 7172 - protein, 40 aa, Artificial Sequence
  Description of Artificial Sequence: Synthetic polypeptide
SRHISIGGKTCTLKSVSNSILECYTPAQTISTEFAVKLKI

SEQ ID NO: 7173 - protein, 40 aa, Artificial Sequence
  Description of Artificial Sequence: Synthetic polypeptide
RHISIGGKTCTLKSVSNSILECYTPAQTISTEFAVKLKID

SEQ ID NO: 7174 - protein, 40 aa, Artificial Sequence
  Description of Artificial Sequence: Synthetic polypeptide
HISIGGKTCTLKSVSNSILECYTPAQTISTEFAVKLKIDL

SEQ ID NO: 7175 - protein, 40 aa, Artificial Sequence
  Description of Artificial Sequence: Synthetic polypeptide
ISIGGKTCTLKSVSNSILECYTPAQTISTEFAVKLKIDLA

SEQ ID NO: 7176 - protein, 40 aa, Artificial Sequence
  Description of Artificial Sequence: Synthetic polypeptide
SIGGKTCTLKSVSNSILECYTPAQTISTEFAVKLKIDLAN

SEQ ID NO: 7177 - protein, 40 aa, Artificial Sequence
  Description of Artificial Sequence: Synthetic polypeptide
IGGKTCTLKSVSNSILECYTPAQTISTEFAVKLKIDLANR

SEQ ID NO: 7178 - protein, 40 aa, Artificial Sequence
  Description of Artificial Sequence: Synthetic polypeptide
GGKTCTLKSVSNSILECYTPAQTISTEFAVKLKIDLANRE

SEQ ID NO: 7179 - protein, 40 aa, Artificial Sequence
  Description of Artificial Sequence: Synthetic polypeptide
TCTLKSVSNSILECYTPAQTISTEFAVKLKIDLANRETSI

SEQ ID NO: 7180 - protein, 40 aa, Artificial Sequence
  Description of Artificial Sequence: Synthetic polypeptide
TLKSVSNSILECYTPAQTISTEFAVKLKIDLANRETSIFS

SEQ ID NO: 7181 - protein, 40 aa, Artificial Sequence
  Description of Artificial Sequence: Synthetic polypeptide
TISTEFAVKLKIDLANRETSIFSYREDPIVYEIHPTKSFI

SEQ ID NO: 7182 - protein, 40 aa, Artificial Sequence
  Description of Artificial Sequence: Synthetic polypeptide
AVKLKIDLANRETSIFSYREDPIVYEIHPTKSFISGGSTI

SEQ ID NO: 7183 - protein, 40 aa, Artificial Sequence
  Description of Artificial Sequence: Synthetic polypeptide
VKLKIDLANRETSIFSYREDPIVYEIHPTKSFISGGSTIT

SEQ ID NO: 7184 - protein, 40 aa, Artificial Sequence
  Description of Artificial Sequence: Synthetic polypeptide
DLANRETSIFSYREDPIVYEIHPTKSFISGGSTITGVGKN

SEQ ID NO: 7185 - protein, 40 aa, Artificial Sequence
  Description of Artificial Sequence: Synthetic polypeptide
TSIFSYREDPIVYEIHPTKSFISGGSTITGVGKNLNSVSV

SEQ ID NO: 7186 - protein, 40 aa, Artificial Sequence
  Description of Artificial Sequence: Synthetic polypeptide
TITGVGKNLNSVSVPRMVINVHEAGRNFTVACQHRSNSEI

SEQ ID NO: 7187 - protein, 40 aa, Artificial Sequence
  Description of Artificial Sequence: Synthetic polypeptide
MNSVSVPRMVINVHEAGRNFTVACQHRSNSEIICCTTPSL

SEQ ID NO: 7188 - protein, 40 aa, Artificial Sequence
  Description of Artificial Sequence: Synthetic polypeptide
SVSVPRMVINVHEAGRNFTVACQHRSNSEIICCTTPSLQQ

SEQ ID NO: 7189 - protein, 40 aa, Artificial Sequence
  Description of Artificial Sequence: Synthetic polypeptide
SVPRMVINVHEAGRNFTVACQHRSNSEIICCTTPSLQQLN

SEQ ID NO: 7190 - protein, 40 aa, Artificial Sequence
  Description of Artificial Sequence: Synthetic polypeptide
NFTVACQHRSNSEIICCTTPSLQQLNLQLPLKTKAFFMLD

SEQ ID NO: 7191 - protein, 40 aa, Artificial Sequence
  Description of Artificial Sequence: Synthetic polypeptide
VACQHRSNSEIICCTTPSLQQLNLQLPLKTKAFFMLDGIL

SEQ ID NO: 7192 - protein, 40 aa, Artificial Sequence
  Description of Artificial Sequence: Synthetic polypeptide
QQLNLQLPLKTKAFFMLDGILSKYFDLIYVHNPVFKPFEK

SEQ ID NO: 7193 - protein, 40 aa, Artificial Sequence
  Description of Artificial Sequence: Synthetic polypeptide
QLNLQLPLKTKAFFMLDGILSKYFDLIYVHNPVFKPFEKP

SEQ ID NO: 7194 - protein, 40 aa, Artificial Sequence
  Description of Artificial Sequence: Synthetic polypeptide
MNLQLPLKTKAFFMLDGILSKYFDLIYVHNPVFKPFEKPV

SEQ ID NO: 7195 - protein, 40 aa, Artificial Sequence
  Description of Artificial Sequence: Synthetic polypeptide
MQLPLKTKAFFMLDGILSKYFDLIYVHNPVFKPFEKPVMI

SEQ ID NO: 7196 - protein, 40 aa, Artificial Sequence
  Description of Artificial Sequence: Synthetic polypeptide
LPLKTKAFFMLDGILSKYFDLIYVHNPVFKPFEKPVMISM

SEQ ID NO: 7197 - protein, 40 aa, Artificial Sequence
  Description of Artificial Sequence: Synthetic polypeptide
MKTKAFFMLDGILSKYFDLIYVHNPVFKPFEKPVMISMGN

SEQ ID NO: 7198 - protein, 40 aa, Artificial Sequence
  Description of Artificial Sequence: Synthetic polypeptide
TKAFFMLDGILSKYFDLIYVHNPVFKPFEKPVMISMGNEN

SEQ ID NO: 7199 - protein, 40 aa, Artificial Sequence
  Description of Artificial Sequence: Synthetic polypeptide
KAFFMLDGILSKYFDLIYVHNPVFKPFEKPVMISMGNENV

SEQ ID NO: 7200 - protein, 40 aa, Artificial Sequence
  Description of Artificial Sequence: Synthetic polypeptide
FMLDGILSKYFDLIYVHNPVFKPFEKPVMISMGNENVLEI

SEQ ID NO: 7201 - protein, 40 aa, Artificial Sequence
  Description of Artificial Sequence: Synthetic polypeptide
LDGILSKYFDLIYVHNPVFKPFEKPVMISMGNENVLEIKG

SEQ ID NO: 7202 - protein, 40 aa, Artificial Sequence
  Description of Artificial Sequence: Synthetic polypeptide
ILSKYFDLIYVHNPVFKPFEKPVMISMGNENVLEIKGNDI

SEQ ID NO: 7203 - protein, 40 aa, Artificial Sequence
  Description of Artificial Sequence: Synthetic polypeptide
LSKYFDLIYVHNPVFKPFEKPVMISMGNENVLEIKGNDID

SEQ ID NO: 7204 - protein, 40 aa, Artificial Sequence
  Description of Artificial Sequence: Synthetic polypeptide
SKYFDLIYVHNPVFKPFEKPVMISMGNENVLEIKGNDIDP

SEQ ID NO: 7205 - protein, 40 aa, Artificial Sequence
  Description of Artificial Sequence: Synthetic polypeptide
DLIYVHNPVFKPFEKPVMISMGNENVLEIKGNDIDPEAVK

SEQ ID NO: 7206 - protein, 40 aa, Artificial Sequence
  Description of Artificial Sequence: Synthetic polypeptide
LIYVHNPVFKPFEKPVMISMGNENVLEIKGNDIDPEAVKG

SEQ ID NO: 7207 - protein, 40 aa, Artificial Sequence
  Description of Artificial Sequence: Synthetic polypeptide
IYVHNPVFKPFEKPVMISMGNENVLEIKGNDIDPEAVKGE

SEQ ID NO: 7208 - protein, 40 aa, Artificial Sequence
  Description of Artificial Sequence: Synthetic polypeptide
HNPVFKPFEKPVMISMGNENVLEIKGNDIDPEAVKGEVLK

SEQ ID NO: 7209 - protein, 40 aa, Artificial Sequence
  Description of Artificial Sequence: Synthetic polypeptide
NPVFKPFEKPVMISMGNENVLEIKGNDIDPEAVKGEVLKV

SEQ ID NO: 7210 - protein, 40 aa, Artificial Sequence
  Description of Artificial Sequence: Synthetic polypeptide
KPFEKPVMISMGNENVLEIKGNDIDPEAVKGEVLKVGNKS

SEQ ID NO: 7211 - protein, 40 aa, Artificial Sequence
  Description of Artificial Sequence: Synthetic polypeptide
PFEKPVMISMGNENVLEIKGNDIDPEAVKGEVLKVGNKSC

SEQ ID NO: 7212 - protein, 40 aa, Artificial Sequence
  Description of Artificial Sequence: Synthetic polypeptide
FEKPVMISMGNENVLEIKGNDIDPEAVKGEVLKVGNKSCE

SEQ ID NO: 7213 - protein, 40 aa, Artificial Sequence
  Description of Artificial Sequence: Synthetic polypeptide
MGNENVLEIKGNDIDPEAVKGEVLKVGNKSCENIHLHSEA

SEQ ID NO: 7214 - protein, 40 aa, Artificial Sequence
  Description of Artificial Sequence: Synthetic polypeptide
NVLEIKGNDIDPEAVKGEVLKVGNKSCENIHLHSEAVLCT

SEQ ID NO: 7215 - protein, 40 aa, Artificial Sequence
  Description of Artificial Sequence: Synthetic polypeptide
EIKGNDIDPEAVKGEVLKVGNKSCENIHLHSEAVLCTVPN

SEQ ID NO: 7216 - protein, 40 aa, Artificial Sequence
  Description of Artificial Sequence: Synthetic polypeptide
NDIDPEAVKGEVLKVGNKSCENIHLHSEAVLCTVPNDLLK

SEQ ID NO: 7217 - protein, 40 aa, Artificial Sequence
  Description of Artificial Sequence: Synthetic polypeptide
DIDPEAVKGEVLKVGNKSCENIHLHSEAVLCTVPNDLLKL

SEQ ID NO: 7218 - protein, 40 aa, Artificial Sequence
  Description of Artificial Sequence: Synthetic polypeptide
IHLHSEAVLCTVPNDLLKLNSELNIEWKQAISSTVLGKVI

SEQ ID NO: 7219 - protein, 40 aa, Artificial Sequence
  Description of Artificial Sequence: Synthetic polypeptide
HLHSEAVLCTVPNDLLKLNSELNIEWKQAISSTVLGKVIV

SEQ ID NO: 7220 - protein, 40 aa, Artificial Sequence
  Description of Artificial Sequence: Synthetic polypeptide
IVQPDQNFTGLIAGVVSISTALLLLLGFFLWLKKRKQIKD

SEQ ID NO: 7221 - protein, 40 aa, Artificial Sequence
  Description of Artificial Sequence: Synthetic polypeptide
VQPDQNFTGLIAGVVSISTALLLLLGFFLWLKKRKQIKDL

SEQ ID NO: 7222 - protein, 40 aa, Artificial Sequence
  Description of Artificial Sequence: Synthetic polypeptide
PDQNFTGLIAGVVSISTALLLLLGFFLWLKKRKQIKDLGS

SEQ ID NO: 7223 - protein, 40 aa, Artificial Sequence
  Description of Artificial Sequence: Synthetic polypeptide
DQNFTGLIAGVVSISTALLLLLGFFLWLKKRKQIKDLGSE

SEQ ID NO: 7224 - protein, 40 aa, Artificial Sequence
  Description of Artificial Sequence: Synthetic polypeptide
GLIAGVVSISTALLLLLGFFLWLKKRKQIKDLGSELVRYD

SEQ ID NO: 7225 - protein, 40 aa, Artificial Sequence
  Description of Artificial Sequence: Synthetic polypeptide
LLLLGFFLWLKKRKQIKDLGSELVRYDARVHTPHLDRLVS

SEQ ID NO: 7226 - protein, 40 aa, Artificial Sequence
  Description of Artificial Sequence: Synthetic polypeptide
KKRKQIKDLGSELVRYDARVHTPHLDRLVSARSVSPTTEM

SEQ ID NO: 7227 - protein, 40 aa, Artificial Sequence
  Description of Artificial Sequence: Synthetic polypeptide
ELVRYDARVHTPHLDRLVSARSVSPTTEMVSNESVDYRAT

SEQ ID NO: 7228 - protein, 40 aa, Artificial Sequence
  Description of Artificial Sequence: Synthetic polypeptide
LVRYDARVHTPHLDRLVSARSVSPTTEMVSNESVDYRATF

SEQ ID NO: 7229 - protein, 40 aa, Artificial Sequence
  Description of Artificial Sequence: Synthetic polypeptide
VRYDARVHTPHLDRLVSARSVSPTTEMVSNESVDYRATFP

SEQ ID NO: 7230 - protein, 40 aa, Artificial Sequence
  Description of Artificial Sequence: Synthetic polypeptide
RVHTPHLDRLVSARSVSPTTEMVSNESVDYRATFPEDQFP

SEQ ID NO: 7231 - protein, 40 aa, Artificial Sequence
  Description of Artificial Sequence: Synthetic polypeptide
HLDRLVSARSVSPTTEMVSNESVDYRATFPEDQFPNSSQN

SEQ ID NO: 7232 - protein, 40 aa, Artificial Sequence
  Description of Artificial Sequence: Synthetic polypeptide
MDRLVSARSVSPTTEMVSNESVDYRATFPEDQFPNSSQNG

SEQ ID NO: 7233 - protein, 40 aa, Artificial Sequence
  Description of Artificial Sequence: Synthetic polypeptide
RLVSARSVSPTTEMVSNESVDYRATFPEDQFPNSSQNGSC

SEQ ID NO: 7234 - protein, 40 aa, Artificial Sequence
  Description of Artificial Sequence: Synthetic polypeptide
VSARSVSPTTEMVSNESVDYRATFPEDQFPNSSQNGSCRQ

SEQ ID NO: 7235 - protein, 40 aa, Artificial Sequence
  Description of Artificial Sequence: Synthetic polypeptide
VSPTTEMVSNESVDYRATFPEDQFPNSSQNGSCRQVQYPL

SEQ ID NO: 7236 - protein, 40 aa, Artificial Sequence
  Description of Artificial Sequence: Synthetic polypeptide
HIDLSALNPELVQAVQHVVIGPSSLIVHFNEVIGRGHFGC

SEQ ID NO: 7237 - protein, 40 aa, Artificial Sequence
  Description of Artificial Sequence: Synthetic polypeptide
DLSALNPELVQAVQHVVIGPSSLIVHFNEVIGRGHFGCVY

SEQ ID NO: 7238 - protein, 40 aa, Artificial Sequence
  Description of Artificial Sequence: Synthetic polypeptide
HVVIGPSSLIVHFNEVIGRGHFGCVYHGTLLDNDGKKIHC

SEQ ID NO: 7239 - protein, 40 aa, Artificial Sequence
  Description of Artificial Sequence: Synthetic polypeptide
PSSLIVHFNEVIGRGHFGCVYHGTLLDNDGKKIHCAVKSL

SEQ ID NO: 7240 - protein, 40 aa, Artificial Sequence
  Description of Artificial Sequence: Synthetic polypeptide
GRGHFGCVYHGTLLDNDGKKIHCAVKSLNRITDIGEVSQF

SEQ ID NO: 7241 - protein, 40 aa, Artificial Sequence
  Description of Artificial Sequence: Synthetic polypeptide
FGCVYHGTLLDNDGKKIHCAVKSLNRITDIGEVSQFLTEG

SEQ ID NO: 7242 - protein, 40 aa, Artificial Sequence
  Description of Artificial Sequence: Synthetic polypeptide
YHGTLLDNDGKKIHCAVKSLNRITDIGEVSQFLTEGIIMK

SEQ ID NO: 7243 - protein, 40 aa, Artificial Sequence
  Description of Artificial Sequence: Synthetic polypeptide
HGDLRNFIRNETHNPTVKDLIGFGLQVAKGMKYLASKKFV

SEQ ID NO: 7244 - protein, 40 aa, Artificial Sequence
  Description of Artificial Sequence: Synthetic polypeptide
LRNFIRNETHNPTVKDLIGFGLQVAKGMKYLASKKFVHRD

SEQ ID NO: 7245 - protein, 40 aa, Artificial Sequence
  Description of Artificial Sequence: Synthetic polypeptide
RNETHNPTVKDLIGFGLQVAKGMKYLASKKFVHRDLAARN

SEQ ID NO: 7246 - protein, 40 aa, Artificial Sequence
  Description of Artificial Sequence: Synthetic polypeptide
NETHNPTVKDLIGFGLQVAKGMKYLASKKFVHRDLAARNC

SEQ ID NO: 7247 - protein, 40 aa, Artificial Sequence
  Description of Artificial Sequence: Synthetic polypeptide
DFGLARDMYDKEYYSVHNKTGAKLPVKWMALESLQTQKFT

SEQ ID NO: 7248 - protein, 40 aa, Artificial Sequence
  Description of Artificial Sequence: Synthetic polypeptide
MYDKEYYSVHNKTGAKLPVKWMALESLQTQKFTTKSDVWS

SEQ ID NO: 7249 - protein, 40 aa, Artificial Sequence
  Description of Artificial Sequence: Synthetic polypeptide
YDKEYYSVHNKTGAKLPVKWMALESLQTQKFTTKSDVWSF

SEQ ID NO: 7250 - protein, 40 aa, Artificial Sequence
  Description of Artificial Sequence: Synthetic polypeptide
QKFTTKSDVWSFGVLLWELMTRGAPPYPDVNTFDITVYLL

SEQ ID NO: 7251 - protein, 40 aa, Artificial Sequence
  Description of Artificial Sequence: Synthetic polypeptide
VWSFGVLLWELMTRGAPPYPDVNTFDITVYLLQGRRLLQP

SEQ ID NO: 7252 - protein, 40 aa, Artificial Sequence
  Description of Artificial Sequence: Synthetic polypeptide
WSFGVLLWELMTRGAPPYPDVNTFDITVYLLQGRRLLQPE

SEQ ID NO: 7253 - protein, 40 aa, Artificial Sequence
  Description of Artificial Sequence: Synthetic polypeptide
FGVLLWELMTRGAPPYPDVNTFDITVYLLQGRRLLQPEYC

SEQ ID NO: 7254 - protein, 40 aa, Artificial Sequence
  Description of Artificial Sequence: Synthetic polypeptide
GVLLWELMTRGAPPYPDVNTFDITVYLLQGRRLLQPEYCP

SEQ ID NO: 7255 - protein, 40 aa, Artificial Sequence
  Description of Artificial Sequence: Synthetic polypeptide
LLWELMTRGAPPYPDVNTFDITVYLLQGRRLLQPEYCPDP

SEQ ID NO: 7256 - protein, 40 aa, Artificial Sequence
  Description of Artificial Sequence: Synthetic polypeptide
LWELMTRGAPPYPDVNTFDITVYLLQGRRLLQPEYCPDPL

SEQ ID NO: 7257 - protein, 40 aa, Artificial Sequence
  Description of Artificial Sequence: Synthetic polypeptide
WELMTRGAPPYPDVNTFDITVYLLQGRRLLQPEYCPDPLY

SEQ ID NO: 7258 - protein, 40 aa, Artificial Sequence
  Description of Artificial Sequence: Synthetic polypeptide
ELMTRGAPPYPDVNTFDITVYLLQGRRLLQPEYCPDPLYE

SEQ ID NO: 7259 - protein, 40 aa, Artificial Sequence
  Description of Artificial Sequence: Synthetic polypeptide
MMTRGAPPYPDVNTFDITVYLLQGRRLLQPEYCPDPLYEV

SEQ ID NO: 7260 - protein, 40 aa, Artificial Sequence
  Description of Artificial Sequence: Synthetic polypeptide
MTRGAPPYPDVNTFDITVYLLQGRRLLQPEYCPDPLYEVM

SEQ ID NO: 7261 - protein, 40 aa, Artificial Sequence
  Description of Artificial Sequence: Synthetic polypeptide
TRGAPPYPDVNTFDITVYLLQGRRLLQPEYCPDPLYEVML

SEQ ID NO: 7262 - protein, 40 aa, Artificial Sequence
  Description of Artificial Sequence: Synthetic polypeptide
RGAPPYPDVNTFDITVYLLQGRRLLQPEYCPDPLYEVMLK

SEQ ID NO: 7263 - protein, 40 aa, Artificial Sequence
  Description of Artificial Sequence: Synthetic polypeptide
APPYPDVNTFDITVYLLQGRRLLQPEYCPDPLYEVMLKCW

SEQ ID NO: 7264 - protein, 40 aa, Artificial Sequence
  Description of Artificial Sequence: Synthetic polypeptide
QPEYCPDPLYEVMLKCWHPKAEMRPSFSELVSRISAIFST

SEQ ID NO: 7265 - protein, 40 aa, Artificial Sequence
  Description of Artificial Sequence: Synthetic polypeptide
PEYCPDPLYEVMLKCWHPKAEMRPSFSELVSRISAIFSTF

SEQ ID NO: 7266 - protein, 40 aa, Artificial Sequence
  Description of Artificial Sequence: Synthetic polypeptide
RPSFSELVSRISAIFSTFIGEHYVHVNATYVNVKCVAPYP

SEQ ID NO: 7267 - protein, 40 aa, Artificial Sequence
  Description of Artificial Sequence: Synthetic polypeptide
SFSELVSRISAIFSTFIGEHYVHVNATYVNVKCVAPYPSL

SEQ ID NO: 7268 - protein, 40 aa, Artificial Sequence
  Description of Artificial Sequence: Synthetic polypeptide
FSELVSRISAIFSTFIGEHYVHVNATYVNVKCVAPYPSLL

SEQ ID NO: 7269 - protein, 40 aa, Artificial Sequence
  Description of Artificial Sequence: Synthetic polypeptide
SELVSRISAIFSTFIGEHYVHVNATYVNVKCVAPYPSLLS

SEQ ID NO: 7270 - protein, 40 aa, Artificial Sequence
  Description of Artificial Sequence: Synthetic polypeptide
VSRISAIFSTFIGEHYVHVNATYVNVKCVAPYPSLLSSED

SEQ ID NO: 7271 - protein, 40 aa, Artificial Sequence
  Description of Artificial Sequence: Synthetic polypeptide
SRISAIFSTFIGEHYVHVNATYVNVKCVAPYPSLLSSEDN

SEQ ID NO: 7272 - protein, 40 aa, Artificial Sequence
  Description of Artificial Sequence: Synthetic polypeptide
IGEHYVHVNATYVNVKCVAPYPSLLSSEDNADDEVDTRPA

SEQ ID NO: 7273 - protein, 40 aa, Artificial Sequence
  Description of Artificial Sequence: Synthetic polypeptide
HYVHVNATYVNVKCVAPYPSLLSSEDNADDEVDTRPASFW

SEQ ID NO: 7274 - protein, 40 aa, Artificial Sequence
  Description of Artificial Sequence: Synthetic polypeptide
AAATTAATTSSNVSVLQQFASGLKSRNEETRAKAAKELQH

SEQ ID NO: 7275 - protein, 40 aa, Artificial Sequence
  Description of Artificial Sequence: Synthetic polypeptide
QFASGLKSRNEETRAKAAKELQHYVTMELREMSQEESTRF

SEQ ID NO: 7276 - protein, 40 aa, Artificial Sequence
  Description of Artificial Sequence: Synthetic polypeptide
FASGLKSRNEETRAKAAKELQHYVTMELREMSQEESTRFY

SEQ ID NO: 7277 - protein, 40 aa, Artificial Sequence
  Description of Artificial Sequence: Synthetic polypeptide
SGLKSRNEETRAKAAKELQHYVTMELREMSQEESTRFYDQ

SEQ ID NO: 7278 - protein, 40 aa, Artificial Sequence
  Description of Artificial Sequence: Synthetic polypeptide
LQHYVTMELREMSQEESTRFYDQLNHHIFELVSSSDANER

SEQ ID NO: 7279 - protein, 40 aa, Artificial Sequence
  Description of Artificial Sequence: Synthetic polypeptide
ELREMSQEESTRFYDQLNHHIFELVSSSDANERKGGILAI

SEQ ID NO: 7280 - protein, 40 aa, Artificial Sequence
  Description of Artificial Sequence: Synthetic polypeptide
ALEWLGADRNEGRRHAAVLVLRELAISVPTFFFQQVQPFF

SEQ ID NO: 7281 - protein, 40 aa, Artificial Sequence
  Description of Artificial Sequence: Synthetic polypeptide
EGRRHAAVLVLRELAISVPTFFFQQVQPFFDNIFVAVWDP

SEQ ID NO: 7282 - protein, 40 aa, Artificial Sequence
  Description of Artificial Sequence: Synthetic polypeptide
QQVQPFFDNIFVAVWDPKQAIREGAVAALRACLILTTQRE

SEQ ID NO: 7283 - protein, 40 aa, Artificial Sequence
  Description of Artificial Sequence: Synthetic polypeptide
RDDRIHGALLILNELVRISSMEGERLREEMEEITQQQLVH

SEQ ID NO: 7284 - protein, 40 aa, Artificial Sequence
  Description of Artificial Sequence: Synthetic polypeptide
YSSHQGLMGFGTSPSPAKSTLVESRCCRDLMEEKFDQVCQ

SEQ ID NO: 7285 - protein, 40 aa, Artificial Sequence
  Description of Artificial Sequence: Synthetic polypeptide
LMGFGTSPSPAKSTLVESRCCRDLMEEKFDQVCQWVLKCR

SEQ ID NO: 7286 - protein, 40 aa, Artificial Sequence
  Description of Artificial Sequence: Synthetic polypeptide
PSPAKSTLVESRCCRDLMEEKFDQVCQWVLKCRNSKNSLI

SEQ ID NO: 7287 - protein, 40 aa, Artificial Sequence
  Description of Artificial Sequence: Synthetic polypeptide
MVESRCCRDLMEEKFDQVCQWVLKCRNSKNSLIQMTILNL

SEQ ID NO: 7288 - protein, 40 aa, Artificial Sequence
  Description of Artificial Sequence: Synthetic polypeptide
CVKKEKERTAAFQALGLLSVAVRSEFKVYLPRVLDIIRAA

SEQ ID NO: 7289 - protein, 40 aa, Artificial Sequence
  Description of Artificial Sequence: Synthetic polypeptide
ERTAAFQALGLLSVAVRSEFKVYLPRVLDIIRAALPPKDF

SEQ ID NO: 7290 - protein, 40 aa, Artificial Sequence
  Description of Artificial Sequence: Synthetic polypeptide
TAAFQALGLLSVAVRSEFKVYLPRVLDIIRAALPPKDFAH

SEQ ID NO: 7291 - protein, 40 aa, Artificial Sequence
  Description of Artificial Sequence: Synthetic polypeptide
AAFQALGLLSVAVRSEFKVYLPRVLDIIRAALPPKDFAHK

SEQ ID NO: 7292 - protein, 40 aa, Artificial Sequence
  Description of Artificial Sequence: Synthetic polypeptide
AFQALGLLSVAVRSEFKVYLPRVLDIIRAALPPKDFAHKR

SEQ ID NO: 7293 - protein, 40 aa, Artificial Sequence
  Description of Artificial Sequence: Synthetic polypeptide
AMQVDATVFTCISMLARAMGPGIQQDIKELLEPMLAVGLS

SEQ ID NO: 7294 - protein, 40 aa, Artificial Sequence
  Description of Artificial Sequence: Synthetic polypeptide
QVDATVFTCISMLARAMGPGIQQDIKELLEPMLAVGLSPA

SEQ ID NO: 7295 - protein, 40 aa, Artificial Sequence
  Description of Artificial Sequence: Synthetic polypeptide
GHAHVVSQTAVQVVADVLSKLLVVGITDPDPDIRYCVLAS

SEQ ID NO: 7296 - protein, 40 aa, Artificial Sequence
  Description of Artificial Sequence: Synthetic polypeptide
HAHVVSQTAVQVVADVLSKLLVVGITDPDPDIRYCVLASL

SEQ ID NO: 7297 - protein, 40 aa, Artificial Sequence
  Description of Artificial Sequence: Synthetic polypeptide
VLSKLLVVGITDPDPDIRYCVLASLDERFDAHLAQAENLQ

SEQ ID NO: 7298 - protein, 40 aa, Artificial Sequence
  Description of Artificial Sequence: Synthetic polypeptide
PYMEPILKALILKLKDPDPDPNPGVINNVLATIGELAQVS

SEQ ID NO: 7299 - protein, 40 aa, Artificial Sequence
  Description of Artificial Sequence: Synthetic polypeptide
YMEPILKALILKLKDPDPDPNPGVINNVLATIGELAQVSG

SEQ ID NO: 7300 - protein, 40 aa, Artificial Sequence
  Description of Artificial Sequence: Synthetic polypeptide
KALILKLKDPDPDPNPGVINNVLATIGELAQVSGLEMRKW

SEQ ID NO: 7301 - protein, 40 aa, Artificial Sequence
  Description of Artificial Sequence: Synthetic polypeptide
LILKLKDPDPDPNPGVINNVLATIGELAQVSGLEMRKWVD

SEQ ID NO: 7302 - protein, 40 aa, Artificial Sequence
  Description of Artificial Sequence: Synthetic polypeptide
ILKLKDPDPDPNPGVINNVLATIGELAQVSGLEMRKWVDE

SEQ ID NO: 7303 - protein, 40 aa, Artificial Sequence
  Description of Artificial Sequence: Synthetic polypeptide
MKLKDPDPDPNPGVINNVLATIGELAQVSGLEMRKWVDEL

SEQ ID NO: 7304 - protein, 40 aa, Artificial Sequence
  Description of Artificial Sequence: Synthetic polypeptide
KLKDPDPDPNPGVINNVLATIGELAQVSGLEMRKWVDELF

SEQ ID NO: 7305 - protein, 40 aa, Artificial Sequence
  Description of Artificial Sequence: Synthetic polypeptide
KDPDPDPNPGVINNVLATIGELAQVSGLEMRKWVDELFII

SEQ ID NO: 7306 - protein, 40 aa, Artificial Sequence
  Description of Artificial Sequence: Synthetic polypeptide
DPDPDPNPGVINNVLATIGELAQVSGLEMRKWVDELFIII

SEQ ID NO: 7307 - protein, 40 aa, Artificial Sequence
  Description of Artificial Sequence: Synthetic polypeptide
PDPNPGVINNVLATIGELAQVSGLEMRKWVDELFIIIMDM

SEQ ID NO: 7308 - protein, 40 aa, Artificial Sequence
  Description of Artificial Sequence: Synthetic polypeptide
VLATIGELAQVSGLEMRKWVDELFIIIMDMLQDSSLLAKR

SEQ ID NO: 7309 - protein, 40 aa, Artificial Sequence
  Description of Artificial Sequence: Synthetic polypeptide
GELAQVSGLEMRKWVDELFIIIMDMLQDSSLLAKRQVALW

SEQ ID NO: 7310 - protein, 40 aa, Artificial Sequence
  Description of Artificial Sequence: Synthetic polypeptide
FIIIMDMLQDSSLLAKRQVALWTLGQLVASTGYVVEPYRK

SEQ ID NO: 7311 - protein, 40 aa, Artificial Sequence
  Description of Artificial Sequence: Synthetic polypeptide
TLLEVLLNFLKTEQNQGTRREAIRVLGLLGALDPYKHKVN

SEQ ID NO: 7312 - protein, 40 aa, Artificial Sequence
  Description of Artificial Sequence: Synthetic polypeptide
SSQDSSDYSTSEMLVNMGNLPLDEFYPAVSMVALMRIFRD

SEQ ID NO: 7313 - protein, 40 aa, Artificial Sequence
  Description of Artificial Sequence: Synthetic polypeptide
SDYSTSEMLVNMGNLPLDEFYPAVSMVALMRIFRDQSLSH

SEQ ID NO: 7314 - protein, 40 aa, Artificial Sequence
  Description of Artificial Sequence: Synthetic polypeptide
DYSTSEMLVNMGNLPLDEFYPAVSMVALMRIFRDQSLSHH

SEQ ID NO: 7315 - protein, 40 aa, Artificial Sequence
  Description of Artificial Sequence: Synthetic polypeptide
MGNLPLDEFYPAVSMVALMRIFRDQSLSHHHTMVVQAITF

SEQ ID NO: 7316 - protein, 40 aa, Artificial Sequence
  Description of Artificial Sequence: Synthetic polypeptide
RVCDGAIREFLFQQLGMLVSFVKSHIRPYMDEIVTLMREF

SEQ ID NO: 7317 - protein, 40 aa, Artificial Sequence
  Description of Artificial Sequence: Synthetic polypeptide
RSTAMDTLSSLVFQLGKKYQIFIPMVNKVLVRHRINHQRY

SEQ ID NO: 7318 - protein, 40 aa, Artificial Sequence
  Description of Artificial Sequence: Synthetic polypeptide
AMDTLSSLVFQLGKKYQIFIPMVNKVLVRHRINHQRYDVL

SEQ ID NO: 7319 - protein, 40 aa, Artificial Sequence
  Description of Artificial Sequence: Synthetic polypeptide
MSSLVFQLGKKYQIFIPMVNKVLVRHRINHQRYDVLICRI

SEQ ID NO: 7320 - protein, 40 aa, Artificial Sequence
  Description of Artificial Sequence: Synthetic polypeptide
MVRHRINHQRYDVLICRIVKGYTLADEEEDPLIYQHRMLR

SEQ ID NO: 7321 - protein, 40 aa, Artificial Sequence
  Description of Artificial Sequence: Synthetic polypeptide
RMLRSGQGDALASGPVETGPMKKLHVSTINLQKAWGAARR

SEQ ID NO: 7322 - protein, 40 aa, Artificial Sequence
  Description of Artificial Sequence: Synthetic polypeptide
MLRSGQGDALASGPVETGPMKKLHVSTINLQKAWGAARRV

SEQ ID NO: 7323 - protein, 40 aa, Artificial Sequence
  Description of Artificial Sequence: Synthetic polypeptide
SGQGDALASGPVETGPMKKLHVSTINLQKAWGAARRVSKD

SEQ ID NO: 7324 - protein, 40 aa, Artificial Sequence
  Description of Artificial Sequence: Synthetic polypeptide
TSQDIAEVTQTLLNLAEFMEHSDKGPLPLRDDNGIVLLGE

SEQ ID NO: 7325 - protein, 40 aa, Artificial Sequence
  Description of Artificial Sequence: Synthetic polypeptide
MAEFMEHSDKGPLPLRDDNGIVLLGERAAKCRAYAKALHY

SEQ ID NO: 7326 - protein, 40 aa, Artificial Sequence
  Description of Artificial Sequence: Synthetic polypeptide
SDKGPLPLRDDNGIVLLGERAAKCRAYAKALHYKELEFQK

SEQ ID NO: 7327 - protein, 40 aa, Artificial Sequence
  Description of Artificial Sequence: Synthetic polypeptide
RAYAKALHYKELEFQKGPTPAILESLISINNKLQQPEAAA

SEQ ID NO: 7328 - protein, 40 aa, Artificial Sequence
  Description of Artificial Sequence: Synthetic polypeptide
AYAKALHYKELEFQKGPTPAILESLISINNKLQQPEAAAG

SEQ ID NO: 7329 - protein, 40 aa, Artificial Sequence
  Description of Artificial Sequence: Synthetic polypeptide
YAKALHYKELEFQKGPTPAILESLISINNKLQQPEAAAGV

SEQ ID NO: 7330 - protein, 40 aa, Artificial Sequence
  Description of Artificial Sequence: Synthetic polypeptide
AKALHYKELEFQKGPTPAILESLISINNKLQQPEAAAGVL

SEQ ID NO: 7331 - protein, 40 aa, Artificial Sequence
  Description of Artificial Sequence: Synthetic polypeptide
KALHYKELEFQKGPTPAILESLISINNKLQQPEAAAGVLE

SEQ ID NO: 7332 - protein, 40 aa, Artificial Sequence
  Description of Artificial Sequence: Synthetic polypeptide
ALHYKELEFQKGPTPAILESLISINNKLQQPEAAAGVLEY

SEQ ID NO: 7333 - protein, 40 aa, Artificial Sequence
  Description of Artificial Sequence: Synthetic polypeptide
DKKMDTNKDDPELMLGRMRCLEALGEWGQLHQQCCEKWTL

SEQ ID NO: 7334 - protein, 40 aa, Artificial Sequence
  Description of Artificial Sequence: Synthetic polypeptide
AMAGESYSRAYGAMVSCHMLSELEEVIQYKLVPERREIIR

SEQ ID NO: 7335 - protein, 40 aa, Artificial Sequence
  Description of Artificial Sequence: Synthetic polypeptide
QGCQRIVEDWQKILMVRSLVVSPHEDMRTWLKYASLCGKS

SEQ ID NO: 7336 - protein, 40 aa, Artificial Sequence
  Description of Artificial Sequence: Synthetic polypeptide
CQRIVEDWQKILMVRSLVVSPHEDMRTWLKYASLCGKSGR

SEQ ID NO: 7337 - protein, 40 aa, Artificial Sequence
  Description of Artificial Sequence: Synthetic polypeptide
WQKILMVRSLVVSPHEDMRTWLKYASLCGKSGRLALAHKT

SEQ ID NO: 7338 - protein, 40 aa, Artificial Sequence
  Description of Artificial Sequence: Synthetic polypeptide
SPHEDMRTWLKYASLCGKSGRLALAHKTLVLLLGVDPSRQ

SEQ ID NO: 7339 - protein, 40 aa, Artificial Sequence
  Description of Artificial Sequence: Synthetic polypeptide
SGRLALAHKTLVLLLGVDPSRQLDHPLPTVHPQVTYAYMK

SEQ ID NO: 7340 - protein, 40 aa, Artificial Sequence
  Description of Artificial Sequence: Synthetic polypeptide
RLALAHKTLVLLLGVDPSRQLDHPLPTVHPQVTYAYMKNM

SEQ ID NO: 7341 - protein, 40 aa, Artificial Sequence
  Description of Artificial Sequence: Synthetic polypeptide
WYKAWHAWAVMNFEAVLHYKHQNQARDEKKKLRHASGANI

SEQ ID NO: 7342 - protein, 40 aa, Artificial Sequence
  Description of Artificial Sequence: Synthetic polypeptide
SPLQKKVTEDLSKTLLMYTVPAVQGFFRSISLSRGNNLQD

SEQ ID NO: 7343 - protein, 40 aa, Artificial Sequence
  Description of Artificial Sequence: Synthetic polypeptide
SKTLLMYTVPAVQGFFRSISLSRGNNLQDTLRVLTLWFDY

SEQ ID NO: 7344 - protein, 40 aa, Artificial Sequence
  Description of Artificial Sequence: Synthetic polypeptide
YTVPAVQGFFRSISLSRGNNLQDTLRVLTLWFDYGHWPDV

SEQ ID NO: 7345 - protein, 40 aa, Artificial Sequence
  Description of Artificial Sequence: Synthetic polypeptide
VLTLWFDYGHWPDVNEALVEGVKAIQIDTWLQVIPQLIAR

SEQ ID NO: 7346 - protein, 40 aa, Artificial Sequence
  Description of Artificial Sequence: Synthetic polypeptide
TLWFDYGHWPDVNEALVEGVKAIQIDTWLQVIPQLIARID

SEQ ID NO: 7347 - protein, 40 aa, Artificial Sequence
  Description of Artificial Sequence: Synthetic polypeptide
GHWPDVNEALVEGVKAIQIDTWLQVIPQLIARIDTPRPLV

SEQ ID NO: 7348 - protein, 40 aa, Artificial Sequence
  Description of Artificial Sequence: Synthetic polypeptide
IARIDTPRPLVGRLIHQLLTDIGRYHPQALIYPLTVASKS

SEQ ID NO: 7349 - protein, 40 aa, Artificial Sequence
  Description of Artificial Sequence: Synthetic polypeptide
PRPLVGRLIHQLLTDIGRYHPQALIYPLTVASKSTTTARH

SEQ ID NO: 7350 - protein, 40 aa, Artificial Sequence
  Description of Artificial Sequence: Synthetic polypeptide
PLTVASKSTTTARHNAANKILKNMCEHSNTLVQQAMMVSE

SEQ ID NO: 7351 - protein, 40 aa, Artificial Sequence
  Description of Artificial Sequence: Synthetic polypeptide
SRLYFGERNVKGMFEVLEPLHAMMERGPQTLKETSFNQAY

SEQ ID NO: 7352 - protein, 40 aa, Artificial Sequence
  Description of Artificial Sequence: Synthetic polypeptide
YFGERNVKGMFEVLEPLHAMMERGPQTLKETSFNQAYGRD

SEQ ID NO: 7353 - protein, 40 aa, Artificial Sequence
  Description of Artificial Sequence: Synthetic polypeptide
EVLEPLHAMMERGPQTLKETSFNQAYGRDLMEAQEWCRKY

SEQ ID NO: 7354 - protein, 40 aa, Artificial Sequence
  Description of Artificial Sequence: Synthetic polypeptide
MKETSFNQAYGRDLMEAQEWCRKYMKSGNVKDLTQAWDLY

SEQ ID NO: 7355 - protein, 40 aa, Artificial Sequence
  Description of Artificial Sequence: Synthetic polypeptide
ETSFNQAYGRDLMEAQEWCRKYMKSGNVKDLTQAWDLYYH

SEQ ID NO: 7356 - protein, 40 aa, Artificial Sequence
  Description of Artificial Sequence: Synthetic polypeptide
MTLMQKVEVFEHAVNNTAGDDLAKLLWLKSPSSEVWFDRR

SEQ ID NO: 7357 - protein, 40 aa, Artificial Sequence
  Description of Artificial Sequence: Synthetic polypeptide
AGDDLAKLLWLKSPSSEVWFDRRTNYTRSLAVMSMVGYIL

SEQ ID NO: 7358 - protein, 40 aa, Artificial Sequence
  Description of Artificial Sequence: Synthetic polypeptide
HPSNLMLDRLSGKILHIDFGDCFEVAMTREKFPEKIPFRL

SEQ ID NO: 7359 - protein, 40 aa, Artificial Sequence
  Description of Artificial Sequence: Synthetic polypeptide
SNLMLDRLSGKILHIDFGDCFEVAMTREKFPEKIPFRLTR

SEQ ID NO: 7360 - protein, 40 aa, Artificial Sequence
  Description of Artificial Sequence: Synthetic polypeptide
KRSRTRTDSYSAGQSVEILDGVELGEPAHKKTGTTVPESI

SEQ ID NO: 7361 - protein, 40 aa, Artificial Sequence
  Description of Artificial Sequence: Synthetic polypeptide
RSRTRTDSYSAGQSVEILDGVELGEPAHKKTGTTVPESIH

SEQ ID NO: 7362 - protein, 40 aa, Artificial Sequence
  Description of Artificial Sequence: Synthetic polypeptide
YSAGQSVEILDGVELGEPAHKKTGTTVPESIHSFIGDGLV

SEQ ID NO: 7363 - protein, 40 aa, Artificial Sequence
  Description of Artificial Sequence: Synthetic polypeptide
SAGQSVEILDGVELGEPAHKKTGTTVPESIHSFIGDGLVK

SEQ ID NO: 7364 - protein, 40 aa, Artificial Sequence
  Description of Artificial Sequence: Synthetic polypeptide
AGQSVEILDGVELGEPAHKKTGTTVPESIHSFIGDGLVKP

SEQ ID NO: 7365 - protein, 40 aa, Artificial Sequence
  Description of Artificial Sequence: Synthetic polypeptide
VEILDGVELGEPAHKKTGTTVPESIHSFIGDGLVKPEALN

SEQ ID NO: 7366 - protein, 40 aa, Artificial Sequence
  Description of Artificial Sequence: Synthetic polypeptide
EILDGVELGEPAHKKTGTTVPESIHSFIGDGLVKPEALNK

SEQ ID NO: 7367 - protein, 40 aa, Artificial Sequence
  Description of Artificial Sequence: Synthetic polypeptide
ILDGVELGEPAHKKTGTTVPESIHSFIGDGLVKPEALNKK

SEQ ID NO: 7368 - protein, 40 aa, Artificial Sequence
  Description of Artificial Sequence: Synthetic polypeptide
MDGVELGEPAHKKTGTTVPESIHSFIGDGLVKPEALNKKA

SEQ ID NO: 7369 - protein, 40 aa, Artificial Sequence
  Description of Artificial Sequence: Synthetic polypeptide
DGVELGEPAHKKTGTTVPESIHSFIGDGLVKPEALNKKAI

SEQ ID NO: 7370 - protein, 40 aa, Artificial Sequence
  Description of Artificial Sequence: Synthetic polypeptide
VELGEPAHKKTGTTVPESIHSFIGDGLVKPEALNKKAIQI

SEQ ID NO: 7371 - protein, 40 aa, Artificial Sequence
  Description of Artificial Sequence: Synthetic polypeptide
AHKKTGTTVPESIHSFIGDGLVKPEALNKKAIQIINRVRD

SEQ ID NO: 7372 - protein, 40 aa, Artificial Sequence
  Description of Artificial Sequence: Synthetic polypeptide
KKTGTTVPESIHSFIGDGLVKPEALNKKAIQIINRVRDKL

SEQ ID NO: 7373 - protein, 40 aa, Artificial Sequence
  Description of Artificial Sequence: Synthetic polypeptide
TGTTVPESIHSFIGDGLVKPEALNKKAIQIINRVRDKLTG

SEQ ID NO: 7374 - protein, 40 aa, Artificial Sequence
  Description of Artificial Sequence: Synthetic polypeptide
TVPESIHSFIGDGLVKPEALNKKAIQIINRVRDKLTGRDF

SEQ ID NO: 7375 - protein, 40 aa, Artificial Sequence
  Description of Artificial Sequence: Synthetic polypeptide
VPESIHSFIGDGLVKPEALNKKAIQIINRVRDKLTGRDFS

SEQ ID NO: 7376 - protein, 40 aa, Artificial Sequence
  Description of Artificial Sequence: Synthetic polypeptide
PESIHSFIGDGLVKPEALNKKAIQIINRVRDKLTGRDFSH

SEQ ID NO: 7377 - protein, 40 aa, Artificial Sequence
  Description of Artificial Sequence: Synthetic polypeptide
ESIHSFIGDGLVKPEALNKKAIQIINRVRDKLTGRDFSHD

SEQ ID NO: 7378 - protein, 40 aa, Artificial Sequence
  Description of Artificial Sequence: Synthetic polypeptide
MVKPEALNKKAIQIINRVRDKLTGRDFSHDDTLDVPTQVE

SEQ ID NO: 7379 - protein, 40 aa, Artificial Sequence
  Description of Artificial Sequence: Synthetic polypeptide
KPEALNKKAIQIINRVRDKLTGRDFSHDDTLDVPTQVELL

SEQ ID NO: 7380 - protein, 40 aa, Artificial Sequence
  Description of Artificial Sequence: Synthetic polypeptide
QQPPATMPLNVSFTNRNYDLDYDSVQPYFYCDEEENFYQQ

SEQ ID NO: 7381 - protein, 40 aa, Artificial Sequence
  Description of Artificial Sequence: Synthetic polypeptide
LNVSFTNRNYDLDYDSVQPYFYCDEEENFYQQQQQSELQP

SEQ ID NO: 7382 - protein, 40 aa, Artificial Sequence
  Description of Artificial Sequence: Synthetic polypeptide
NYDLDYDSVQPYFYCDEEENFYQQQQQSELQPPAPSEDIW

SEQ ID NO: 7383 - protein, 40 aa, Artificial Sequence
  Description of Artificial Sequence: Synthetic polypeptide
DSVQPYFYCDEEENFYQQQQQSELQPPAPSEDIWKKFELL

SEQ ID NO: 7384 - protein, 40 aa, Artificial Sequence
  Description of Artificial Sequence: Synthetic polypeptide
THNVLERQRRNELKRSFFALRDQIPELENNEKAPKVVILK

SEQ ID NO: 7385 - protein, 40 aa, Artificial Sequence
  Description of Artificial Sequence: Synthetic polypeptide
HNVLERQRRNELKRSFFALRDQIPELENNEKAPKVVILKK

SEQ ID NO: 7386 - protein, 40 aa, Artificial Sequence
  Description of Artificial Sequence: Synthetic polypeptide
NVLERQRRNELKRSFFALRDQIPELENNEKAPKVVILKKA

SEQ ID NO: 7387 - protein, 40 aa, Artificial Sequence
  Description of Artificial Sequence: Synthetic polypeptide
ERQRRNELKRSFFALRDQIPELENNEKAPKVVILKKATAY

SEQ ID NO: 7388 - protein, 40 aa, Artificial Sequence
  Description of Artificial Sequence: Synthetic polypeptide
RQRRNELKRSFFALRDQIPELENNEKAPKVVILKKATAYI

SEQ ID NO: 7389 - protein, 40 aa, Artificial Sequence
  Description of Artificial Sequence: Synthetic polypeptide
RRNELKRSFFALRDQIPELENNEKAPKVVILKKATAYILS

SEQ ID NO: 7390 - protein, 40 aa, Artificial Sequence
  Description of Artificial Sequence: Synthetic polypeptide
RNELKRSFFALRDQIPELENNEKAPKVVILKKATAYILSV

SEQ ID NO: 7391 - protein, 40 aa, Artificial Sequence
  Description of Artificial Sequence: Synthetic polypeptide
NELKRSFFALRDQIPELENNEKAPKVVILKKATAYILSVQ

SEQ ID NO: 7392 - protein, 40 aa, Artificial Sequence
  Description of Artificial Sequence: Synthetic polypeptide
ELKRSFFALRDQIPELENNEKAPKVVILKKATAYILSVQA

SEQ ID NO: 7393 - protein, 40 aa, Artificial Sequence
  Description of Artificial Sequence: Synthetic polypeptide
KRSFFALRDQIPELENNEKAPKVVILKKATAYILSVQAEE

SEQ ID NO: 7394 - protein, 40 aa, Artificial Sequence
  Description of Artificial Sequence: Synthetic polypeptide
RSFFALRDQIPELENNEKAPKVVILKKATAYILSVQAEEQ

SEQ ID NO: 7395 - protein, 40 aa, Artificial Sequence
  Description of Artificial Sequence: Synthetic polypeptide
SFFALRDQIPELENNEKAPKVVILKKATAYILSVQAEEQK

SEQ ID NO: 7396 - protein, 40 aa, Artificial Sequence
  Description of Artificial Sequence: Synthetic polypeptide
FFALRDQIPELENNEKAPKVVILKKATAYILSVQAEEQKL

SEQ ID NO: 7397 - protein, 40 aa, Artificial Sequence
  Description of Artificial Sequence: Synthetic polypeptide
FALRDQIPELENNEKAPKVVILKKATAYILSVQAEEQKLI

SEQ ID NO: 7398 - protein, 40 aa, Artificial Sequence
  Description of Artificial Sequence: Synthetic polypeptide
ALRDQIPELENNEKAPKVVILKKATAYILSVQAEEQKLIS

SEQ ID NO: 7399 - protein, 40 aa, Artificial Sequence
  Description of Artificial Sequence: Synthetic polypeptide
MRDQIPELENNEKAPKVVILKKATAYILSVQAEEQKLISE

SEQ ID NO: 7400 - protein, 40 aa, Artificial Sequence
  Description of Artificial Sequence: Synthetic polypeptide
RDQIPELENNEKAPKVVILKKATAYILSVQAEEQKLISEE

SEQ ID NO: 7401 - protein, 40 aa, Artificial Sequence
  Description of Artificial Sequence: Synthetic polypeptide
DQIPELENNEKAPKVVILKKATAYILSVQAEEQKLISEED

SEQ ID NO: 7402 - protein, 40 aa, Artificial Sequence
  Description of Artificial Sequence: Synthetic polypeptide
QIPELENNEKAPKVVILKKATAYILSVQAEEQKLISEEDL

SEQ ID NO: 7403 - protein, 40 aa, Artificial Sequence
  Description of Artificial Sequence: Synthetic polypeptide
IPELENNEKAPKVVILKKATAYILSVQAEEQKLISEEDLL

SEQ ID NO: 7404 - protein, 40 aa, Artificial Sequence
  Description of Artificial Sequence: Synthetic polypeptide
PELENNEKAPKVVILKKATAYILSVQAEEQKLISEEDLLR

SEQ ID NO: 7405 - protein, 40 aa, Artificial Sequence
  Description of Artificial Sequence: Synthetic polypeptide
ELENNEKAPKVVILKKATAYILSVQAEEQKLISEEDLLRK

SEQ ID NO: 7406 - protein, 40 aa, Artificial Sequence
  Description of Artificial Sequence: Synthetic polypeptide
NNEKAPKVVILKKATAYILSVQAEEQKLISEEDLLRKRRE

SEQ ID NO: 7407 - protein, 40 aa, Artificial Sequence
  Description of Artificial Sequence: Synthetic polypeptide
EKAPKVVILKKATAYILSVQAEEQKLISEEDLLRKRREQL

SEQ ID NO: 7408 - protein, 40 aa, Artificial Sequence
  Description of Artificial Sequence: Synthetic polypeptide
KAPKVVILKKATAYILSVQAEEQKLISEEDLLRKRREQLK

SEQ ID NO: 7409 - protein, 40 aa, Artificial Sequence
  Description of Artificial Sequence: Synthetic polypeptide
VILKKATAYILSVQAEEQKLISEEDLLRKRREQLKHKLEQ

SEQ ID NO: 7410 - protein, 40 aa, Artificial Sequence
  Description of Artificial Sequence: Synthetic polypeptide
TAPSEDIWKKFELVPSPPTSPPWGLGPGAGDPAPGIGPPE

SEQ ID NO: 7411 - protein, 40 aa, Artificial Sequence
  Description of Artificial Sequence: Synthetic polypeptide
EDIWKKFELVPSPPTSPPWGLGPGAGDPAPGIGPPEPWPG

SEQ ID NO: 7412 - protein, 40 aa, Artificial Sequence
  Description of Artificial Sequence: Synthetic polypeptide
DIWKKFELVPSPPTSPPWGLGPGAGDPAPGIGPPEPWPGG

SEQ ID NO: 7413 - protein, 40 aa, Artificial Sequence
  Description of Artificial Sequence: Synthetic polypeptide
IWKKFELVPSPPTSPPWGLGPGAGDPAPGIGPPEPWPGGC

SEQ ID NO: 7414 - protein, 40 aa, Artificial Sequence
  Description of Artificial Sequence: Synthetic polypeptide
WKKFELVPSPPTSPPWGLGPGAGDPAPGIGPPEPWPGGCT

SEQ ID NO: 7415 - protein, 40 aa, Artificial Sequence
  Description of Artificial Sequence: Synthetic polypeptide
KKFELVPSPPTSPPWGLGPGAGDPAPGIGPPEPWPGGCTG

SEQ ID NO: 7416 - protein, 40 aa, Artificial Sequence
  Description of Artificial Sequence: Synthetic polypeptide
KFELVPSPPTSPPWGLGPGAGDPAPGIGPPEPWPGGCTGD

SEQ ID NO: 7417 - protein, 40 aa, Artificial Sequence
  Description of Artificial Sequence: Synthetic polypeptide
PPTSPPWGLGPGAGDPAPGIGPPEPWPGGCTGDEAESRGH

SEQ ID NO: 7418 - protein, 40 aa, Artificial Sequence
  Description of Artificial Sequence: Synthetic polypeptide
TSPPWGLGPGAGDPAPGIGPPEPWPGGCTGDEAESRGHSK

SEQ ID NO: 7419 - protein, 40 aa, Artificial Sequence
  Description of Artificial Sequence: Synthetic polypeptide
IRRDCMWSGFSARERLERAVSDRLAPGAPRGNPPKASAAP

SEQ ID NO: 7420 - protein, 40 aa, Artificial Sequence
  Description of Artificial Sequence: Synthetic polypeptide
CSGSESPSDSENEEIDVVTVEKRQSLGIRKPVTITVRADP

SEQ ID NO: 7421 - protein, 40 aa, Artificial Sequence
  Description of Artificial Sequence: Synthetic polypeptide
VVTVEKRQSLGIRKPVTITVRADPLDPCMKHFHISIHQQQ

SEQ ID NO: 7422 - protein, 40 aa, Artificial Sequence
  Description of Artificial Sequence: Synthetic polypeptide
QEEASERGPQEEVLERDAAGEKEDEEDEEIVSPPPVESEA

SEQ ID NO: 7423 - protein, 40 aa, Artificial Sequence
  Description of Artificial Sequence: Synthetic polypeptide
DTEDVTKRKNHNFLERKRRNDLRSRFLALRDQVPTLASCS

SEQ ID NO: 7424 - protein, 40 aa, Artificial Sequence
  Description of Artificial Sequence: Synthetic polypeptide
HNFLERKRRNDLRSRFLALRDQVPTLASCSKAPKVVILSK

SEQ ID NO: 7425 - protein, 40 aa, Artificial Sequence
  Description of Artificial Sequence: Synthetic polypeptide
RRNDLRSRFLALRDQVPTLASCSKAPKVVILSKALEYLQA

SEQ ID NO: 7426 - protein, 40 aa, Artificial Sequence
  Description of Artificial Sequence: Synthetic polypeptide
SKALEYLQALVGAEKRMATEKRQLRCRQQQLQKRIAYLTG

SEQ ID NO: 7427 - protein, 40 aa, Artificial Sequence
  Description of Artificial Sequence: Synthetic polypeptide
GLGGLGGLTPNPVILQDCMWSGFSAREKLERAVSEKLQHG

SEQ ID NO: 7428 - protein, 40 aa, Artificial Sequence
  Description of Artificial Sequence: Synthetic polypeptide
QDCMWSGFSAREKLERAVSEKLQHGRGPPTAGSTAQSPGA

SEQ ID NO: 7429 - protein, 40 aa, Artificial Sequence
  Description of Artificial Sequence: Synthetic polypeptide
AAECVDPAVVFPFPVNKREPAPVPAAPASAPAAGPAVASG

SEQ ID NO: 7430 - protein, 40 aa, Artificial Sequence
  Description of Artificial Sequence: Synthetic polypeptide
ECVDPAVVFPFPVNKREPAPVPAAPASAPAAGPAVASGAG

SEQ ID NO: 7431 - protein, 40 aa, Artificial Sequence
  Description of Artificial Sequence: Synthetic polypeptide
CVDPAVVFPFPVNKREPAPVPAAPASAPAAGPAVASGAGI

SEQ ID NO: 7432 - protein, 40 aa, Artificial Sequence
  Description of Artificial Sequence: Synthetic polypeptide
VDPAVVFPFPVNKREPAPVPAAPASAPAAGPAVASGAGIA

SEQ ID NO: 7433 - protein, 40 aa, Artificial Sequence
  Description of Artificial Sequence: Synthetic polypeptide
AVVFPFPVNKREPAPVPAAPASAPAAGPAVASGAGIAAPA

SEQ ID NO: 7434 - protein, 40 aa, Artificial Sequence
  Description of Artificial Sequence: Synthetic polypeptide
VFPFPVNKREPAPVPAAPASAPAAGPAVASGAGIAAPAGA

SEQ ID NO: 7435 - protein, 40 aa, Artificial Sequence
  Description of Artificial Sequence: Synthetic polypeptide
FPFPVNKREPAPVPAAPASAPAAGPAVASGAGIAAPAGAP

SEQ ID NO: 7436 - protein, 40 aa, Artificial Sequence
  Description of Artificial Sequence: Synthetic polypeptide
REPAPVPAAPASAPAAGPAVASGAGIAAPAGAPGVAPPRP

SEQ ID NO: 7437 - protein, 40 aa, Artificial Sequence
  Description of Artificial Sequence: Synthetic polypeptide
PAAGPAVASGAGIAAPAGAPGVAPPRPGGRQTSGGDHKAL

SEQ ID NO: 7438 - protein, 40 aa, Artificial Sequence
  Description of Artificial Sequence: Synthetic polypeptide
GPAVASGAGIAAPAGAPGVAPPRPGGRQTSGGDHKALSTS

SEQ ID NO: 7439 - protein, 40 aa, Artificial Sequence
  Description of Artificial Sequence: Synthetic polypeptide
AVASGAGIAAPAGAPGVAPPRPGGRQTSGGDHKALSTSGE

SEQ ID NO: 7440 - protein, 40 aa, Artificial Sequence
  Description of Artificial Sequence: Synthetic polypeptide
SGAGIAAPAGAPGVAPPRPGGRQTSGGDHKALSTSGEDTL

SEQ ID NO: 7441 - protein, 40 aa, Artificial Sequence
  Description of Artificial Sequence: Synthetic polypeptide
AGIAAPAGAPGVAPPRPGGRQTSGGDHKALSTSGEDTLSD

SEQ ID NO: 7442 - protein, 40 aa, Artificial Sequence
  Description of Artificial Sequence: Synthetic polypeptide
IAAPAGAPGVAPPRPGGRQTSGGDHKALSTSGEDTLSDSD

SEQ ID NO: 7443 - protein, 40 aa, Artificial Sequence
  Description of Artificial Sequence: Synthetic polypeptide
PPQKKIKSEASPRPLKSVIPPKAKSLSPRNSDSEDSERRR

SEQ ID NO: 7444 - protein, 40 aa, Artificial Sequence
  Description of Artificial Sequence: Synthetic polypeptide
KIKSEASPRPLKSVIPPKAKSLSPRNSDSEDSERRRNHNI

SEQ ID NO: 7445 - protein, 40 aa, Artificial Sequence
  Description of Artificial Sequence: Synthetic polypeptide
SPRPLKSVIPPKAKSLSPRNSDSEDSERRRNHNILERQRR

SEQ ID NO: 7446 - protein, 40 aa, Artificial Sequence
  Description of Artificial Sequence: Synthetic polypeptide
RPLKSVIPPKAKSLSPRNSDSEDSERRRNHNILERQRRND

SEQ ID NO: 7447 - protein, 40 aa, Artificial Sequence
  Description of Artificial Sequence: Synthetic polypeptide
PLKSVIPPKAKSLSPRNSDSEDSERRRNHNILERQRRNDL

SEQ ID NO: 7448 - protein, 40 aa, Artificial Sequence
  Description of Artificial Sequence: Synthetic polypeptide
LKSVIPPKAKSLSPRNSDSEDSERRRNHNILERQRRNDLR

SEQ ID NO: 7449 - protein, 40 aa, Artificial Sequence
  Description of Artificial Sequence: Synthetic polypeptide
VIPPKAKSLSPRNSDSEDSERRRNHNILERQRRNDLRSSF

SEQ ID NO: 7450 - protein, 40 aa, Artificial Sequence
  Description of Artificial Sequence: Synthetic polypeptide
KAKSLSPRNSDSEDSERRRNHNILERQRRNDLRSSFLTLR

SEQ ID NO: 7451 - protein, 40 aa, Artificial Sequence
  Description of Artificial Sequence: Synthetic polypeptide
ERQRRNDLRSSFLTLRDHVPELVKNEKAAKVVILKKATEY

SEQ ID NO: 7452 - protein, 40 aa, Artificial Sequence
  Description of Artificial Sequence: Synthetic polypeptide
VPELVKNEKAAKVVILKKATEYVHSLQAEEHQLLLEKEKL

SEQ ID NO: 7453 - protein, 40 aa, Artificial Sequence
  Description of Artificial Sequence: Synthetic polypeptide
MKKATEYVHSLQAEEHQLLLEKEKLQARQQQLLKKIEHAR

SEQ ID NO: 7454 - protein, 40 aa, Artificial Sequence
  Description of Artificial Sequence: Synthetic polypeptide
RKRKLPCDTPGQGLTCSGEKRRREQESKYIEELAELISAN

SEQ ID NO: 7455 - protein, 40 aa, Artificial Sequence
  Description of Artificial Sequence: Synthetic polypeptide
LTCSGEKRRREQESKYIEELAELISANLSDIDNFNVKPDK

SEQ ID NO: 7456 - protein, 40 aa, Artificial Sequence
  Description of Artificial Sequence: Synthetic polypeptide
EKRRREQESKYIEELAELISANLSDIDNFNVKPDKCAILK

SEQ ID NO: 7457 - protein, 40 aa, Artificial Sequence
  Description of Artificial Sequence: Synthetic polypeptide
RRREQESKYIEELAELISANLSDIDNFNVKPDKCAILKET

SEQ ID NO: 7458 - protein, 40 aa, Artificial Sequence
  Description of Artificial Sequence: Synthetic polypeptide
YIEELAELISANLSDIDNFNVKPDKCAILKETVRQIRQIK

SEQ ID NO: 7459 - protein, 40 aa, Artificial Sequence
  Description of Artificial Sequence: Synthetic polypeptide
ELAELISANLSDIDNFNVKPDKCAILKETVRQIRQIKEQG

SEQ ID NO: 7460 - protein, 40 aa, Artificial Sequence
  Description of Artificial Sequence: Synthetic polypeptide
MAELISANLSDIDNFNVKPDKCAILKETVRQIRQIKEQGK

SEQ ID NO: 7461 - protein, 40 aa, Artificial Sequence
  Description of Artificial Sequence: Synthetic polypeptide
ANLSDIDNFNVKPDKCAILKETVRQIRQIKEQGKTISNDD

SEQ ID NO: 7462 - protein, 40 aa, Artificial Sequence
  Description of Artificial Sequence: Synthetic polypeptide
NLSDIDNFNVKPDKCAILKETVRQIRQIKEQGKTISNDDD

SEQ ID NO: 7463 - protein, 40 aa, Artificial Sequence
  Description of Artificial Sequence: Synthetic polypeptide
LSDIDNFNVKPDKCAILKETVRQIRQIKEQGKTISNDDDV

SEQ ID NO: 7464 - protein, 40 aa, Artificial Sequence
  Description of Artificial Sequence: Synthetic polypeptide
SDIDNFNVKPDKCAILKETVRQIRQIKEQGKTISNDDDVQ

SEQ ID NO: 7465 - protein, 40 aa, Artificial Sequence
  Description of Artificial Sequence: Synthetic polypeptide
DIDNFNVKPDKCAILKETVRQIRQIKEQGKTISNDDDVQK

SEQ ID NO: 7466 - protein, 40 aa, Artificial Sequence
  Description of Artificial Sequence: Synthetic polypeptide
IDNFNVKPDKCAILKETVRQIRQIKEQGKTISNDDDVQKA

SEQ ID NO: 7467 - protein, 40 aa, Artificial Sequence
  Description of Artificial Sequence: Synthetic polypeptide
DNFNVKPDKCAILKETVRQIRQIKEQGKTISNDDDVQKAD

SEQ ID NO: 7468 - protein, 40 aa, Artificial Sequence
  Description of Artificial Sequence: Synthetic polypeptide
FNVKPDKCAILKETVRQIRQIKEQGKTISNDDDVQKADVS

SEQ ID NO: 7469 - protein, 40 aa, Artificial Sequence
  Description of Artificial Sequence: Synthetic polypeptide
NVKPDKCAILKETVRQIRQIKEQGKTISNDDDVQKADVSS

SEQ ID NO: 7470 - protein, 40 aa, Artificial Sequence
  Description of Artificial Sequence: Synthetic polypeptide
VKPDKCAILKETVRQIRQIKEQGKTISNDDDVQKADVSST

SEQ ID NO: 7471 - protein, 40 aa, Artificial Sequence
  Description of Artificial Sequence: Synthetic polypeptide
PDKCAILKETVRQIRQIKEQGKTISNDDDVQKADVSSTGQ

SEQ ID NO: 7472 - protein, 40 aa, Artificial Sequence
  Description of Artificial Sequence: Synthetic polypeptide
DKCAILKETVRQIRQIKEQGKTISNDDDVQKADVSSTGQG

SEQ ID NO: 7473 - protein, 40 aa, Artificial Sequence
  Description of Artificial Sequence: Synthetic polypeptide
KCAILKETVRQIRQIKEQGKTISNDDDVQKADVSSTGQGV

SEQ ID NO: 7474 - protein, 40 aa, Artificial Sequence
  Description of Artificial Sequence: Synthetic polypeptide
CAILKETVRQIRQIKEQGKTISNDDDVQKADVSSTGQGVI

SEQ ID NO: 7475 - protein, 40 aa, Artificial Sequence
  Description of Artificial Sequence: Synthetic polypeptide
AILKETVRQIRQIKEQGKTISNDDDVQKADVSSTGQGVID

SEQ ID NO: 7476 - protein, 40 aa, Artificial Sequence
  Description of Artificial Sequence: Synthetic polypeptide
LKETVRQIRQIKEQGKTISNDDDVQKADVSSTGQGVIDKD

SEQ ID NO: 7477 - protein, 40 aa, Artificial Sequence
  Description of Artificial Sequence: Synthetic polypeptide
KETVRQIRQIKEQGKTISNDDDVQKADVSSTGQGVIDKDS

SEQ ID NO: 7478 - protein, 40 aa, Artificial Sequence
  Description of Artificial Sequence: Synthetic polypeptide
ETVRQIRQIKEQGKTISNDDDVQKADVSSTGQGVIDKDSL

SEQ ID NO: 7479 - protein, 40 aa, Artificial Sequence
  Description of Artificial Sequence: Synthetic polypeptide
TVRQIRQIKEQGKTISNDDDVQKADVSSTGQGVIDKDSLG

SEQ ID NO: 7480 - protein, 40 aa, Artificial Sequence
  Description of Artificial Sequence: Synthetic polypeptide
VRQIRQIKEQGKTISNDDDVQKADVSSTGQGVIDKDSLGP

SEQ ID NO: 7481 - protein, 40 aa, Artificial Sequence
  Description of Artificial Sequence: Synthetic polypeptide
IRQIKEQGKTISNDDDVQKADVSSTGQGVIDKDSLGPLLL

SEQ ID NO: 7482 - protein, 40 aa, Artificial Sequence
  Description of Artificial Sequence: Synthetic polypeptide
QIKEQGKTISNDDDVQKADVSSTGQGVIDKDSLGPLLLQA

SEQ ID NO: 7483 - protein, 40 aa, Artificial Sequence
  Description of Artificial Sequence: Synthetic polypeptide
GKTISNDDDVQKADVSSTGQGVIDKDSLGPLLLQALDGFL

SEQ ID NO: 7484 - protein, 40 aa, Artificial Sequence
  Description of Artificial Sequence: Synthetic polypeptide
KTISNDDDVQKADVSSTGQGVIDKDSLGPLLLQALDGFLF

SEQ ID NO: 7485 - protein, 40 aa, Artificial Sequence
  Description of Artificial Sequence: Synthetic polypeptide
TISNDDDVQKADVSSTGQGVIDKDSLGPLLLQALDGFLFV

SEQ ID NO: 7486 - protein, 40 aa, Artificial Sequence
  Description of Artificial Sequence: Synthetic polypeptide
ISNDDDVQKADVSSTGQGVIDKDSLGPLLLQALDGFLFVV

SEQ ID NO: 7487 - protein, 40 aa, Artificial Sequence
  Description of Artificial Sequence: Synthetic polypeptide
SNDDDVQKADVSSTGQGVIDKDSLGPLLLQALDGFLFVVN

SEQ ID NO: 7488 - protein, 40 aa, Artificial Sequence
  Description of Artificial Sequence: Synthetic polypeptide
NDDDVQKADVSSTGQGVIDKDSLGPLLLQALDGFLFVVNR

SEQ ID NO: 7489 - protein, 40 aa, Artificial Sequence
  Description of Artificial Sequence: Synthetic polypeptide
VQKADVSSTGQGVIDKDSLGPLLLQALDGFLFVVNRDGNI

SEQ ID NO: 7490 - protein, 40 aa, Artificial Sequence
  Description of Artificial Sequence: Synthetic polypeptide
ADVSSTGQGVIDKDSLGPLLLQALDGFLFVVNRDGNIVFV

SEQ ID NO: 7491 - protein, 40 aa, Artificial Sequence
  Description of Artificial Sequence: Synthetic polypeptide
DVSSTGQGVIDKDSLGPLLLQALDGFLFVVNRDGNIVFVS

SEQ ID NO: 7492 - protein, 40 aa, Artificial Sequence
  Description of Artificial Sequence: Synthetic polypeptide
SSTGQGVIDKDSLGPLLLQALDGFLFVVNRDGNIVFVSEN

SEQ ID NO: 7493 - protein, 40 aa, Artificial Sequence
  Description of Artificial Sequence: Synthetic polypeptide
IDKDSLGPLLLQALDGFLFVVNRDGNIVFVSENVTQYLQY

SEQ ID NO: 7494 - protein, 40 aa, Artificial Sequence
  Description of Artificial Sequence: Synthetic polypeptide
DKDSLGPLLLQALDGFLFVVNRDGNIVFVSENVTQYLQYK

SEQ ID NO: 7495 - protein, 40 aa, Artificial Sequence
  Description of Artificial Sequence: Synthetic polypeptide
KDSLGPLLLQALDGFLFVVNRDGNIVFVSENVTQYLQYKQ

SEQ ID NO: 7496 - protein, 40 aa, Artificial Sequence
  Description of Artificial Sequence: Synthetic polypeptide
LGPLLLQALDGFLFVVNRDGNIVFVSENVTQYLQYKQEDL

SEQ ID NO: 7497 - protein, 40 aa, Artificial Sequence
  Description of Artificial Sequence: Synthetic polypeptide
GPLLLQALDGFLFVVNRDGNIVFVSENVTQYLQYKQEDLV

SEQ ID NO: 7498 - protein, 40 aa, Artificial Sequence
  Description of Artificial Sequence: Synthetic polypeptide
PLLLQALDGFLFVVNRDGNIVFVSENVTQYLQYKQEDLVN

SEQ ID NO: 7499 - protein, 40 aa, Artificial Sequence
  Description of Artificial Sequence: Synthetic polypeptide
LLLQALDGFLFVVNRDGNIVFVSENVTQYLQYKQEDLVNT

SEQ ID NO: 7500 - protein, 40 aa, Artificial Sequence
  Description of Artificial Sequence: Synthetic polypeptide
QALDGFLFVVNRDGNIVFVSENVTQYLQYKQEDLVNTSVY

SEQ ID NO: 7501 - protein, 40 aa, Artificial Sequence
  Description of Artificial Sequence: Synthetic polypeptide
MDGFLFVVNRDGNIVFVSENVTQYLQYKQEDLVNTSVYNI

SEQ ID NO: 7502 - protein, 40 aa, Artificial Sequence
  Description of Artificial Sequence: Synthetic polypeptide
GFLFVVNRDGNIVFVSENVTQYLQYKQEDLVNTSVYNILH

SEQ ID NO: 7503 - protein, 40 aa, Artificial Sequence
  Description of Artificial Sequence: Synthetic polypeptide
NIVFVSENVTQYLQYKQEDLVNTSVYNILHEEDRKDFLKN

SEQ ID NO: 7504 - protein, 40 aa, Artificial Sequence
  Description of Artificial Sequence: Synthetic polypeptide
VFVSENVTQYLQYKQEDLVNTSVYNILHEEDRKDFLKNLP

SEQ ID NO: 7505 - protein, 40 aa, Artificial Sequence
  Description of Artificial Sequence: Synthetic polypeptide
FVSENVTQYLQYKQEDLVNTSVYNILHEEDRKDFLKNLPK

SEQ ID NO: 7506 - protein, 40 aa, Artificial Sequence
  Description of Artificial Sequence: Synthetic polypeptide
SENVTQYLQYKQEDLVNTSVYNILHEEDRKDFLKNLPKST

SEQ ID NO: 7507 - protein, 40 aa, Artificial Sequence
  Description of Artificial Sequence: Synthetic polypeptide
ENVTQYLQYKQEDLVNTSVYNILHEEDRKDFLKNLPKSTV

SEQ ID NO: 7508 - protein, 40 aa, Artificial Sequence
  Description of Artificial Sequence: Synthetic polypeptide
NVTQYLQYKQEDLVNTSVYNILHEEDRKDFLKNLPKSTVN

SEQ ID NO: 7509 - protein, 40 aa, Artificial Sequence
  Description of Artificial Sequence: Synthetic polypeptide
YLQYKQEDLVNTSVYNILHEEDRKDFLKNLPKSTVNGVSW

SEQ ID NO: 7510 - protein, 40 aa, Artificial Sequence
  Description of Artificial Sequence: Synthetic polypeptide
QYKQEDLVNTSVYNILHEEDRKDFLKNLPKSTVNGVSWTN

SEQ ID NO: 7511 - protein, 40 aa, Artificial Sequence
  Description of Artificial Sequence: Synthetic polypeptide
YKQEDLVNTSVYNILHEEDRKDFLKNLPKSTVNGVSWTNE

SEQ ID NO: 7512 - protein, 40 aa, Artificial Sequence
  Description of Artificial Sequence: Synthetic polypeptide
KQEDLVNTSVYNILHEEDRKDFLKNLPKSTVNGVSWTNET

SEQ ID NO: 7513 - protein, 40 aa, Artificial Sequence
  Description of Artificial Sequence: Synthetic polypeptide
QEDLVNTSVYNILHEEDRKDFLKNLPKSTVNGVSWTNETQ

SEQ ID NO: 7514 - protein, 40 aa, Artificial Sequence
  Description of Artificial Sequence: Synthetic polypeptide
EDLVNTSVYNILHEEDRKDFLKNLPKSTVNGVSWTNETQR

SEQ ID NO: 7515 - protein, 40 aa, Artificial Sequence
  Description of Artificial Sequence: Synthetic polypeptide
DLVNTSVYNILHEEDRKDFLKNLPKSTVNGVSWTNETQRQ

SEQ ID NO: 7516 - protein, 40 aa, Artificial Sequence
  Description of Artificial Sequence: Synthetic polypeptide
NTSVYNILHEEDRKDFLKNLPKSTVNGVSWTNETQRQKSH

SEQ ID NO: 7517 - protein, 40 aa, Artificial Sequence
  Description of Artificial Sequence: Synthetic polypeptide
EDRKDFLKNLPKSTVNGVSWTNETQRQKSHTFNCRMLMKT

SEQ ID NO: 7518 - protein, 40 aa, Artificial Sequence
  Description of Artificial Sequence: Synthetic polypeptide
RKDFLKNLPKSTVNGVSWTNETQRQKSHTFNCRMLMKTPH

SEQ ID NO: 7519 - protein, 40 aa, Artificial Sequence
  Description of Artificial Sequence: Synthetic polypeptide
KDFLKNLPKSTVNGVSWTNETQRQKSHTFNCRMLMKTPHD

SEQ ID NO: 7520 - protein, 40 aa, Artificial Sequence
  Description of Artificial Sequence: Synthetic polypeptide
LKNLPKSTVNGVSWTNETQRQKSHTFNCRMLMKTPHDILE

SEQ ID NO: 7521 - protein, 40 aa, Artificial Sequence
  Description of Artificial Sequence: Synthetic polypeptide
PKSTVNGVSWTNETQRQKSHTFNCRMLMKTPHDILEDINA

SEQ ID NO: 7522 - protein, 40 aa, Artificial Sequence
  Description of Artificial Sequence: Synthetic polypeptide
KSTVNGVSWTNETQRQKSHTFNCRMLMKTPHDILEDINAS

SEQ ID NO: 7523 - protein, 40 aa, Artificial Sequence
  Description of Artificial Sequence: Synthetic polypeptide
VNGVSWTNETQRQKSHTFNCRMLMKTPHDILEDINASPEM

SEQ ID NO: 7524 - protein, 40 aa, Artificial Sequence
  Description of Artificial Sequence: Synthetic polypeptide
NGVSWTNETQRQKSHTFNCRMLMKTPHDILEDINASPEMR

SEQ ID NO: 7525 - protein, 40 aa, Artificial Sequence
  Description of Artificial Sequence: Synthetic polypeptide
TNETQRQKSHTFNCRMLMKTPHDILEDINASPEMRQRYET

SEQ ID NO: 7526 - protein, 40 aa, Artificial Sequence
  Description of Artificial Sequence: Synthetic polypeptide
NETQRQKSHTFNCRMLMKTPHDILEDINASPEMRQRYETM

SEQ ID NO: 7527 - protein, 40 aa, Artificial Sequence
  Description of Artificial Sequence: Synthetic polypeptide
HTFNCRMLMKTPHDILEDINASPEMRQRYETMQCFALSQP

SEQ ID NO: 7528 - protein, 40 aa, Artificial Sequence
  Description of Artificial Sequence: Synthetic polypeptide
SCMICVARRITTGERTFPSNPESFITRHDLSGKVVNIDTN

SEQ ID NO: 7529 - protein, 40 aa, Artificial Sequence
  Description of Artificial Sequence: Synthetic polypeptide
MICVARRITTGERTFPSNPESFITRHDLSGKVVNIDTNSL

SEQ ID NO: 7530 - protein, 40 aa, Artificial Sequence
  Description of Artificial Sequence: Synthetic polypeptide
RTFPSNPESFITRHDLSGKVVNIDTNSLRSSMRPGFEDII

SEQ ID NO: 7531 - protein, 40 aa, Artificial Sequence
  Description of Artificial Sequence: Synthetic polypeptide
FPSNPESFITRHDLSGKVVNIDTNSLRSSMRPGFEDIIRR

SEQ ID NO: 7532 - protein, 40 aa, Artificial Sequence
  Description of Artificial Sequence: Synthetic polypeptide
SFITRHDLSGKVVNIDTNSLRSSMRPGFEDIIRRCIQRFF

SEQ ID NO: 7533 - protein, 40 aa, Artificial Sequence
  Description of Artificial Sequence: Synthetic polypeptide
FITRHDLSGKVVNIDTNSLRSSMRPGFEDIIRRCIQRFFS

SEQ ID NO: 7534 - protein, 40 aa, Artificial Sequence
  Description of Artificial Sequence: Synthetic polypeptide
TRHDLSGKVVNIDTNSLRSSMRPGFEDIIRRCIQRFFSLN

SEQ ID NO: 7535 - protein, 40 aa, Artificial Sequence
  Description of Artificial Sequence: Synthetic polypeptide
RHDLSGKVVNIDTNSLRSSMRPGFEDIIRRCIQRFFSLND

SEQ ID NO: 7536 - protein, 40 aa, Artificial Sequence
  Description of Artificial Sequence: Synthetic polypeptide
DLSGKVVNIDTNSLRSSMRPGFEDIIRRCIQRFFSLNDGQ

SEQ ID NO: 7537 - protein, 40 aa, Artificial Sequence
  Description of Artificial Sequence: Synthetic polypeptide
LSGKVVNIDTNSLRSSMRPGFEDIIRRCIQRFFSLNDGQS

SEQ ID NO: 7538 - protein, 40 aa, Artificial Sequence
  Description of Artificial Sequence: Synthetic polypeptide
GKVVNIDTNSLRSSMRPGFEDIIRRCIQRFFSLNDGQSWS

SEQ ID NO: 7539 - protein, 40 aa, Artificial Sequence
  Description of Artificial Sequence: Synthetic polypeptide
NIDTNSLRSSMRPGFEDIIRRCIQRFFSLNDGQSWSQKRH

SEQ ID NO: 7540 - protein, 40 aa, Artificial Sequence
  Description of Artificial Sequence: Synthetic polypeptide
SLRSSMRPGFEDIIRRCIQRFFSLNDGQSWSQKRHYQEAY

SEQ ID NO: 7541 - protein, 40 aa, Artificial Sequence
  Description of Artificial Sequence: Synthetic polypeptide
RSSMRPGFEDIIRRCIQRFFSLNDGQSWSQKRHYQEAYLN

SEQ ID NO: 7542 - protein, 40 aa, Artificial Sequence
  Description of Artificial Sequence: Synthetic polypeptide
SSMRPGFEDIIRRCIQRFFSLNDGQSWSQKRHYQEAYLNG

SEQ ID NO: 7543 - protein, 40 aa, Artificial Sequence
  Description of Artificial Sequence: Synthetic polypeptide
SMRPGFEDIIRRCIQRFFSLNDGQSWSQKRHYQEAYLNGH

SEQ ID NO: 7544 - protein, 40 aa, Artificial Sequence
  Description of Artificial Sequence: Synthetic polypeptide
FEDIIRRCIQRFFSLNDGQSWSQKRHYQEAYLNGHAETPV

SEQ ID NO: 7545 - protein, 40 aa, Artificial Sequence
  Description of Artificial Sequence: Synthetic polypeptide
EDIIRRCIQRFFSLNDGQSWSQKRHYQEAYLNGHAETPVY

SEQ ID NO: 7546 - protein, 40 aa, Artificial Sequence
  Description of Artificial Sequence: Synthetic polypeptide
RRCIQRFFSLNDGQSWSQKRHYQEAYLNGHAETPVYRFSL

SEQ ID NO: 7547 - protein, 40 aa, Artificial Sequence
  Description of Artificial Sequence: Synthetic polypeptide
LQREQNGYRPNPNPVGQGIRPPMAGCNSSVGGMSMSPNQG

SEQ ID NO: 7548 - protein, 40 aa, Artificial Sequence
  Description of Artificial Sequence: Synthetic polypeptide
PNQQNIMISPRNRGSPKIASHQFSPVAGVHSPMASSGNTG

SEQ ID NO: 7549 - protein, 40 aa, Artificial Sequence
  Description of Artificial Sequence: Synthetic polypeptide
NQQNIMISPRNRGSPKIASHQFSPVAGVHSPMASSGNTGN

SEQ ID NO: 7550 - protein, 40 aa, Artificial Sequence
  Description of Artificial Sequence: Synthetic polypeptide
NIMISPRNRGSPKIASHQFSPVAGVHSPMASSGNTGNHSF

SEQ ID NO: 7551 - protein, 40 aa, Artificial Sequence
  Description of Artificial Sequence: Synthetic polypeptide
AGVHSPMASSGNTGNHSFSSSSLSALQAISEGVGTSLLST

SEQ ID NO: 7552 - protein, 40 aa, Artificial Sequence
  Description of Artificial Sequence: Synthetic polypeptide
GVHSPMASSGNTGNHSFSSSSLSALQAISEGVGTSLLSTL

SEQ ID NO: 7553 - protein, 40 aa, Artificial Sequence
  Description of Artificial Sequence: Synthetic polypeptide
SFSSSSLSALQAISEGVGTSLLSTLSSPGPKLDNSPNMNI

SEQ ID NO: 7554 - protein, 40 aa, Artificial Sequence
  Description of Artificial Sequence: Synthetic polypeptide
GTSLLSTLSSPGPKLDNSPNMNITQPSKVSNQDSKSPLGF

SEQ ID NO: 7555 - protein, 40 aa, Artificial Sequence
  Description of Artificial Sequence: Synthetic polypeptide
LLSTLSSPGPKLDNSPNMNITQPSKVSNQDSKSPLGFYCD

SEQ ID NO: 7556 - protein, 40 aa, Artificial Sequence
  Description of Artificial Sequence: Synthetic polypeptide
PNMNITQPSKVSNQDSKSPLGFYCDQNPVESSMCQSNSRD

SEQ ID NO: 7557 - protein, 40 aa, Artificial Sequence
  Description of Artificial Sequence: Synthetic polypeptide
NITQPSKVSNQDSKSPLGFYCDQNPVESSMCQSNSRDHLS

SEQ ID NO: 7558 - protein, 40 aa, Artificial Sequence
  Description of Artificial Sequence: Synthetic polypeptide
TQPSKVSNQDSKSPLGFYCDQNPVESSMCQSNSRDHLSDK

SEQ ID NO: 7559 - protein, 40 aa, Artificial Sequence
  Description of Artificial Sequence: Synthetic polypeptide
NQDSKSPLGFYCDQNPVESSMCQSNSRDHLSDKESKESSV

SEQ ID NO: 7560 - protein, 40 aa, Artificial Sequence
  Description of Artificial Sequence: Synthetic polypeptide
KSPLGFYCDQNPVESSMCQSNSRDHLSDKESKESSVEGAE

SEQ ID NO: 7561 - protein, 40 aa, Artificial Sequence
  Description of Artificial Sequence: Synthetic polypeptide
CDQNPVESSMCQSNSRDHLSDKESKESSVEGAENQRGPLE

SEQ ID NO: 7562 - protein, 40 aa, Artificial Sequence
  Description of Artificial Sequence: Synthetic polypeptide
PVESSMCQSNSRDHLSDKESKESSVEGAENQRGPLESKGH

SEQ ID NO: 7563 - protein, 40 aa, Artificial Sequence
  Description of Artificial Sequence: Synthetic polypeptide
VESSMCQSNSRDHLSDKESKESSVEGAENQRGPLESKGHK

SEQ ID NO: 7564 - protein, 40 aa, Artificial Sequence
  Description of Artificial Sequence: Synthetic polypeptide
SSMCQSNSRDHLSDKESKESSVEGAENQRGPLESKGHKKL

SEQ ID NO: 7565 - protein, 40 aa, Artificial Sequence
  Description of Artificial Sequence: Synthetic polypeptide
SMCQSNSRDHLSDKESKESSVEGAENQRGPLESKGHKKLL

SEQ ID NO: 7566 - protein, 40 aa, Artificial Sequence
  Description of Artificial Sequence: Synthetic polypeptide
QSNSRDHLSDKESKESSVEGAENQRGPLESKGHKKLLQLL

SEQ ID NO: 7567 - protein, 40 aa, Artificial Sequence
  Description of Artificial Sequence: Synthetic polypeptide
NSRDHLSDKESKESSVEGAENQRGPLESKGHKKLLQLLTC

SEQ ID NO: 7568 - protein, 40 aa, Artificial Sequence
  Description of Artificial Sequence: Synthetic polypeptide
SRDHLSDKESKESSVEGAENQRGPLESKGHKKLLQLLTCS

SEQ ID NO: 7569 - protein, 40 aa, Artificial Sequence
  Description of Artificial Sequence: Synthetic polypeptide
DHLSDKESKESSVEGAENQRGPLESKGHKKLLQLLTCSSD

SEQ ID NO: 7570 - protein, 40 aa, Artificial Sequence
  Description of Artificial Sequence: Synthetic polypeptide
HLSDKESKESSVEGAENQRGPLESKGHKKLLQLLTCSSDD

SEQ ID NO: 7571 - protein, 40 aa, Artificial Sequence
  Description of Artificial Sequence: Synthetic polypeptide
MQLLTCSSDDRGHSSLTNSPLDSSCKESSVSVTSPSGVSS

SEQ ID NO: 7572 - protein, 40 aa, Artificial Sequence
  Description of Artificial Sequence: Synthetic polypeptide
LLTCSSDDRGHSSLTNSPLDSSCKESSVSVTSPSGVSSST

SEQ ID NO: 7573 - protein, 40 aa, Artificial Sequence
  Description of Artificial Sequence: Synthetic polypeptide
LTCSSDDRGHSSLTNSPLDSSCKESSVSVTSPSGVSSSTS

SEQ ID NO: 7574 - protein, 40 aa, Artificial Sequence
  Description of Artificial Sequence: Synthetic polypeptide
DDRGHSSLTNSPLDSSCKESSVSVTSPSGVSSSTSGGVSS

SEQ ID NO: 7575 - protein, 40 aa, Artificial Sequence
  Description of Artificial Sequence: Synthetic polypeptide
QEKHRILHKLLQNGNSPAEVAKITAEATGKDTSSITSCGD

SEQ ID NO: 7576 - protein, 40 aa, Artificial Sequence
  Description of Artificial Sequence: Synthetic polypeptide
TAEATGKDTSSITSCGDGNVVKQEQLSPKKKENNALLRYL

SEQ ID NO: 7577 - protein, 40 aa, Artificial Sequence
  Description of Artificial Sequence: Synthetic polypeptide
PSDALSKELQPQVEGVDNKMSQCTSSTIPSSSQEKDPKIK

SEQ ID NO: 7578 - protein, 40 aa, Artificial Sequence
  Description of Artificial Sequence: Synthetic polypeptide
QVEGVDNKMSQCTSSTIPSSSQEKDPKIKTETSEEGSGDL

SEQ ID NO: 7579 - protein, 40 aa, Artificial Sequence
  Description of Artificial Sequence: Synthetic polypeptide
VEGVDNKMSQCTSSTIPSSSQEKDPKIKTETSEEGSGDLD

SEQ ID NO: 7580 - protein, 40 aa, Artificial Sequence
  Description of Artificial Sequence: Synthetic polypeptide
VDNKMSQCTSSTIPSSSQEKDPKIKTETSEEGSGDLDNLD

SEQ ID NO: 7581 - protein, 40 aa, Artificial Sequence
  Description of Artificial Sequence: Synthetic polypeptide
SQCTSSTIPSSSQEKDPKIKTETSEEGSGDLDNLDAILGD

SEQ ID NO: 7582 - protein, 40 aa, Artificial Sequence
  Description of Artificial Sequence: Synthetic polypeptide
IPSSSQEKDPKIKTETSEEGSGDLDNLDAILGDLTSSDFY

SEQ ID NO: 7583 - protein, 40 aa, Artificial Sequence
  Description of Artificial Sequence: Synthetic polypeptide
PSSSQEKDPKIKTETSEEGSGDLDNLDAILGDLTSSDFYN

SEQ ID NO: 7584 - protein, 40 aa, Artificial Sequence
  Description of Artificial Sequence: Synthetic polypeptide
SSSQEKDPKIKTETSEEGSGDLDNLDAILGDLTSSDFYNN

SEQ ID NO: 7585 - protein, 40 aa, Artificial Sequence
  Description of Artificial Sequence: Synthetic polypeptide
SQEKDPKIKTETSEEGSGDLDNLDAILGDLTSSDFYNNSI

SEQ ID NO: 7586 - protein, 40 aa, Artificial Sequence
  Description of Artificial Sequence: Synthetic polypeptide
EKDPKIKTETSEEGSGDLDNLDAILGDLTSSDFYNNSISS

SEQ ID NO: 7587 - protein, 40 aa, Artificial Sequence
  Description of Artificial Sequence: Synthetic polypeptide
DPKIKTETSEEGSGDLDNLDAILGDLTSSDFYNNSISSNG

SEQ ID NO: 7588 - protein, 40 aa, Artificial Sequence
  Description of Artificial Sequence: Synthetic polypeptide
NSISSNGSHLGTKQQVFQGTNSLGLKSSQSVQSIRPPYNR

SEQ ID NO: 7589 - protein, 40 aa, Artificial Sequence
  Description of Artificial Sequence: Synthetic polypeptide
SSNGSHLGTKQQVFQGTNSLGLKSSQSVQSIRPPYNRAVS

SEQ ID NO: 7590 - protein, 40 aa, Artificial Sequence
  Description of Artificial Sequence: Synthetic polypeptide
QQVFQGTNSLGLKSSQSVQSIRPPYNRAVSLDSPVSVGSS

SEQ ID NO: 7591 - protein, 40 aa, Artificial Sequence
  Description of Artificial Sequence: Synthetic polypeptide
TNSLGLKSSQSVQSIRPPYNRAVSLDSPVSVGSSPPVKNI

SEQ ID NO: 7592 - protein, 40 aa, Artificial Sequence
  Description of Artificial Sequence: Synthetic polypeptide
NSLGLKSSQSVQSIRPPYNRAVSLDSPVSVGSSPPVKNIS

SEQ ID NO: 7593 - protein, 40 aa, Artificial Sequence
  Description of Artificial Sequence: Synthetic polypeptide
MDSPVSVGSSPPVKNISAFPMLPKQPMLGGNPRMMDSQEN

SEQ ID NO: 7594 - protein, 40 aa, Artificial Sequence
  Description of Artificial Sequence: Synthetic polypeptide
QTPSSGDWGLPNSKAGRMEPMNSNSMGRPGGDYNTSLPRP

SEQ ID NO: 7595 - protein, 40 aa, Artificial Sequence
  Description of Artificial Sequence: Synthetic polypeptide
NSMGRPGGDYNTSLPRPALGGSIPTLPLRSNSIPGARPVL

SEQ ID NO: 7596 - protein, 40 aa, Artificial Sequence
  Description of Artificial Sequence: Synthetic polypeptide
GGDYNTSLPRPALGGSIPTLPLRSNSIPGARPVLQQQQQM

SEQ ID NO: 7597 - protein, 40 aa, Artificial Sequence
  Description of Artificial Sequence: Synthetic polypeptide
MDDLVGPPSNLEGQSDERALLDQLHTLLSNTDATGLEEID

SEQ ID NO: 7598 - protein, 40 aa, Artificial Sequence
  Description of Artificial Sequence: Synthetic polypeptide
LVNQGQALEPKQDAFQGQEAAVMMDQKAGLYGQTYPAQGP

SEQ ID NO: 7599 - protein, 40 aa, Artificial Sequence
  Description of Artificial Sequence: Synthetic polypeptide
ALEPKQDAFQGQEAAVMMDQKAGLYGQTYPAQGPPMQGGF

SEQ ID NO: 7600 - protein, 40 aa, Artificial Sequence
  Description of Artificial Sequence: Synthetic polypeptide
PPMQGGFHLQGQSPSFNSMMNQMNQQGNFPLQGMHPRANI

SEQ ID NO: 7601 - protein, 40 aa, Artificial Sequence
  Description of Artificial Sequence: Synthetic polypeptide
RPRTNTPKQLRMQLQQRLQGQQFLNQSRQALELKMENPTA

SEQ ID NO: 7602 - protein, 40 aa, Artificial Sequence
  Description of Artificial Sequence: Synthetic polypeptide
KQLRMQLQQRLQGQQFLNQSRQALELKMENPTAGGAAVMR

SEQ ID NO: 7603 - protein, 40 aa, Artificial Sequence
  Description of Artificial Sequence: Synthetic polypeptide
QRLQGQQFLNQSRQALELKMENPTAGGAAVMRPMMQPQVS

SEQ ID NO: 7604 - protein, 40 aa, Artificial Sequence
  Description of Artificial Sequence: Synthetic polypeptide
RLQGQQFLNQSRQALELKMENPTAGGAAVMRPMMQPQVSS

SEQ ID NO: 7605 - protein, 40 aa, Artificial Sequence
  Description of Artificial Sequence: Synthetic polypeptide
QGQQFLNQSRQALELKMENPTAGGAAVMRPMMQPQVSSQQ

SEQ ID NO: 7606 - protein, 40 aa, Artificial Sequence
  Description of Artificial Sequence: Synthetic polypeptide
GQQFLNQSRQALELKMENPTAGGAAVMRPMMQPQVSSQQG

SEQ ID NO: 7607 - protein, 40 aa, Artificial Sequence
  Description of Artificial Sequence: Synthetic polypeptide
QQFLNQSRQALELKMENPTAGGAAVMRPMMQPQVSSQQGF

SEQ ID NO: 7608 - protein, 40 aa, Artificial Sequence
  Description of Artificial Sequence: Synthetic polypeptide
QFLNQSRQALELKMENPTAGGAAVMRPMMQPQVSSQQGFL

SEQ ID NO: 7609 - protein, 40 aa, Artificial Sequence
  Description of Artificial Sequence: Synthetic polypeptide
MNQSRQALELKMENPTAGGAAVMRPMMQPQVSSQQGFLNA

SEQ ID NO: 7610 - protein, 40 aa, Artificial Sequence
  Description of Artificial Sequence: Synthetic polypeptide
NQSRQALELKMENPTAGGAAVMRPMMQPQVSSQQGFLNAQ

SEQ ID NO: 7611 - protein, 40 aa, Artificial Sequence
  Description of Artificial Sequence: Synthetic polypeptide
QSRQALELKMENPTAGGAAVMRPMMQPQVSSQQGFLNAQM

SEQ ID NO: 7612 - protein, 40 aa, Artificial Sequence
  Description of Artificial Sequence: Synthetic polypeptide
RQALELKMENPTAGGAAVMRPMMQPQVSSQQGFLNAQMVA

SEQ ID NO: 7613 - protein, 40 aa, Artificial Sequence
  Description of Artificial Sequence: Synthetic polypeptide
ALELKMENPTAGGAAVMRPMMQPQVSSQQGFLNAQMVAQR

SEQ ID NO: 7614 - protein, 40 aa, Artificial Sequence
  Description of Artificial Sequence: Synthetic polypeptide
LELKMENPTAGGAAVMRPMMQPQVSSQQGFLNAQMVAQRS

SEQ ID NO: 7615 - protein, 40 aa, Artificial Sequence
  Description of Artificial Sequence: Synthetic polypeptide
ELKMENPTAGGAAVMRPMMQPQVSSQQGFLNAQMVAQRSR

SEQ ID NO: 7616 - protein, 40 aa, Artificial Sequence
  Description of Artificial Sequence: Synthetic polypeptide
MKMENPTAGGAAVMRPMMQPQVSSQQGFLNAQMVAQRSRE

SEQ ID NO: 7617 - protein, 40 aa, Artificial Sequence
  Description of Artificial Sequence: Synthetic polypeptide
ENPTAGGAAVMRPMMQPQVSSQQGFLNAQMVAQRSRELLS

SEQ ID NO: 7618 - protein, 40 aa, Artificial Sequence
  Description of Artificial Sequence: Synthetic polypeptide
RPMMQPQVSSQQGFLNAQMVAQRSRELLSHHFRQQRVAMM

SEQ ID NO: 7619 - protein, 40 aa, Artificial Sequence
  Description of Artificial Sequence: Synthetic polypeptide
MPPPGLPSQQDMDLIDILWRQDIDLGVSREVFDFSQRRKE

SEQ ID NO: 7620 - protein, 40 aa, Artificial Sequence
  Description of Artificial Sequence: Synthetic polypeptide
PPGLPSQQDMDLIDILWRQDIDLGVSREVFDFSQRRKEYE

SEQ ID NO: 7621 - protein, 40 aa, Artificial Sequence
  Description of Artificial Sequence: Synthetic polypeptide
PSQQDMDLIDILWRQDIDLGVSREVFDFSQRRKEYELEKQ

SEQ ID NO: 7622 - protein, 40 aa, Artificial Sequence
  Description of Artificial Sequence: Synthetic polypeptide
DMDLIDILWRQDIDLGVSREVFDFSQRRKEYELEKQKKLE

SEQ ID NO: 7623 - protein, 40 aa, Artificial Sequence
  Description of Artificial Sequence: Synthetic polypeptide
DLIDILWRQDIDLGVSREVFDFSQRRKEYELEKQKKLEKE

SEQ ID NO: 7624 - protein, 40 aa, Artificial Sequence
  Description of Artificial Sequence: Synthetic polypeptide
MIDILWRQDIDLGVSREVFDFSQRRKEYELEKQKKLEKER

SEQ ID NO: 7625 - protein, 40 aa, Artificial Sequence
  Description of Artificial Sequence: Synthetic polypeptide
IDILWRQDIDLGVSREVFDFSQRRKEYELEKQKKLEKERQ

SEQ ID NO: 7626 - protein, 40 aa, Artificial Sequence
  Description of Artificial Sequence: Synthetic polypeptide
DILWRQDIDLGVSREVFDFSQRRKEYELEKQKKLEKERQE

SEQ ID NO: 7627 - protein, 40 aa, Artificial Sequence
  Description of Artificial Sequence: Synthetic polypeptide
ILWRQDIDLGVSREVFDFSQRRKEYELEKQKKLEKERQEQ

SEQ ID NO: 7628 - protein, 40 aa, Artificial Sequence
  Description of Artificial Sequence: Synthetic polypeptide
LWRQDIDLGVSREVFDFSQRRKEYELEKQKKLEKERQEQL

SEQ ID NO: 7629 - protein, 40 aa, Artificial Sequence
  Description of Artificial Sequence: Synthetic polypeptide
WRQDIDLGVSREVFDFSQRRKEYELEKQKKLEKERQEQLQ

SEQ ID NO: 7630 - protein, 40 aa, Artificial Sequence
  Description of Artificial Sequence: Synthetic polypeptide
RQDIDLGVSREVFDFSQRRKEYELEKQKKLEKERQEQLQK

SEQ ID NO: 7631 - protein, 40 aa, Artificial Sequence
  Description of Artificial Sequence: Synthetic polypeptide
KQKKLEKERQEQLQKEQEKAFFAQLQLDEETGEFLPIQPA

SEQ ID NO: 7632 - protein, 40 aa, Artificial Sequence
  Description of Artificial Sequence: Synthetic polypeptide
QKKLEKERQEQLQKEQEKAFFAQLQLDEETGEFLPIQPAQ

SEQ ID NO: 7633 - protein, 40 aa, Artificial Sequence
  Description of Artificial Sequence: Synthetic polypeptide
KKLEKERQEQLQKEQEKAFFAQLQLDEETGEFLPIQPAQH

SEQ ID NO: 7634 - protein, 40 aa, Artificial Sequence
  Description of Artificial Sequence: Synthetic polypeptide
KEQEKAFFAQLQLDEETGEFLPIQPAQHIQSETSGSANYS

SEQ ID NO: 7635 - protein, 40 aa, Artificial Sequence
  Description of Artificial Sequence: Synthetic polypeptide
SANYSQVAHIPKSDALYFDDCMQLLAQTFPFVDDNEVSSA

SEQ ID NO: 7636 - protein, 40 aa, Artificial Sequence
  Description of Artificial Sequence: Synthetic polypeptide
SQVAHIPKSDALYFDDCMQLLAQTFPFVDDNEVSSATFQS

SEQ ID NO: 7637 - protein, 40 aa, Artificial Sequence
  Description of Artificial Sequence: Synthetic polypeptide
VAHIPKSDALYFDDCMQLLAQTFPFVDDNEVSSATFQSLV

SEQ ID NO: 7638 - protein, 40 aa, Artificial Sequence
  Description of Artificial Sequence: Synthetic polypeptide
IPKSDALYFDDCMQLLAQTFPFVDDNEVSSATFQSLVPDI

SEQ ID NO: 7639 - protein, 40 aa, Artificial Sequence
  Description of Artificial Sequence: Synthetic polypeptide
PFVDDNEVSSATFQSLVPDIPGHIESPVFIATNQAQSPET

SEQ ID NO: 7640 - protein, 40 aa, Artificial Sequence
  Description of Artificial Sequence: Synthetic polypeptide
FVDDNEVSSATFQSLVPDIPGHIESPVFIATNQAQSPETS

SEQ ID NO: 7641 - protein, 40 aa, Artificial Sequence
  Description of Artificial Sequence: Synthetic polypeptide
DDNEVSSATFQSLVPDIPGHIESPVFIATNQAQSPETSVA

SEQ ID NO: 7642 - protein, 40 aa, Artificial Sequence
  Description of Artificial Sequence: Synthetic polypeptide
NEVSSATFQSLVPDIPGHIESPVFIATNQAQSPETSVAQV

SEQ ID NO: 7643 - protein, 40 aa, Artificial Sequence
  Description of Artificial Sequence: Synthetic polypeptide
ATFQSLVPDIPGHIESPVFIATNQAQSPETSVAQVAPVDL

SEQ ID NO: 7644 - protein, 40 aa, Artificial Sequence
  Description of Artificial Sequence: Synthetic polypeptide
TFQSLVPDIPGHIESPVFIATNQAQSPETSVAQVAPVDLD

SEQ ID NO: 7645 - protein, 40 aa, Artificial Sequence
  Description of Artificial Sequence: Synthetic polypeptide
QSLVPDIPGHIESPVFIATNQAQSPETSVAQVAPVDLDGM

SEQ ID NO: 7646 - protein, 40 aa, Artificial Sequence
  Description of Artificial Sequence: Synthetic polypeptide
PGHIESPVFIATNQAQSPETSVAQVAPVDLDGMQQDIEQV

SEQ ID NO: 7647 - protein, 40 aa, Artificial Sequence
  Description of Artificial Sequence: Synthetic polypeptide
IESPVFIATNQAQSPETSVAQVAPVDLDGMQQDIEQVWEE

SEQ ID NO: 7648 - protein, 40 aa, Artificial Sequence
  Description of Artificial Sequence: Synthetic polypeptide
SPVFIATNQAQSPETSVAQVAPVDLDGMQQDIEQVWEELL

SEQ ID NO: 7649 - protein, 40 aa, Artificial Sequence
  Description of Artificial Sequence: Synthetic polypeptide
PVFIATNQAQSPETSVAQVAPVDLDGMQQDIEQVWEELLS

SEQ ID NO: 7650 - protein, 40 aa, Artificial Sequence
  Description of Artificial Sequence: Synthetic polypeptide
TSVAQVAPVDLDGMQQDIEQVWEELLSIPELQCLNIENDK

SEQ ID NO: 7651 - protein, 40 aa, Artificial Sequence
  Description of Artificial Sequence: Synthetic polypeptide
VAPVDLDGMQQDIEQVWEELLSIPELQCLNIENDKLVETT

SEQ ID NO: 7652 - protein, 40 aa, Artificial Sequence
  Description of Artificial Sequence: Synthetic polypeptide
APVDLDGMQQDIEQVWEELLSIPELQCLNIENDKLVETTM

SEQ ID NO: 7653 - protein, 40 aa, Artificial Sequence
  Description of Artificial Sequence: Synthetic polypeptide
EELLSIPELQCLNIENDKLVETTMVPSPEAKLTEVDNYHF

SEQ ID NO: 7654 - protein, 40 aa, Artificial Sequence
  Description of Artificial Sequence: Synthetic polypeptide
SIPELQCLNIENDKLVETTMVPSPEAKLTEVDNYHFYSSI

SEQ ID NO: 7655 - protein, 40 aa, Artificial Sequence
  Description of Artificial Sequence: Synthetic polypeptide
ELQCLNIENDKLVETTMVPSPEAKLTEVDNYHFYSSIPSM

SEQ ID NO: 7656 - protein, 40 aa, Artificial Sequence
  Description of Artificial Sequence: Synthetic polypeptide
CLNIENDKLVETTMVPSPEAKLTEVDNYHFYSSIPSMEKE

SEQ ID NO: 7657 - protein, 40 aa, Artificial Sequence
  Description of Artificial Sequence: Synthetic polypeptide
ENDKLVETTMVPSPEAKLTEVDNYHFYSSIPSMEKEVGNC

SEQ ID NO: 7658 - protein, 40 aa, Artificial Sequence
  Description of Artificial Sequence: Synthetic polypeptide
MVPSPEAKLTEVDNYHFYSSIPSMEKEVGNCSPHFLNAFE

SEQ ID NO: 7659 - protein, 40 aa, Artificial Sequence
  Description of Artificial Sequence: Synthetic polypeptide
VDNYHFYSSIPSMEKEVGNCSPHFLNAFEDSFSSILSTED

SEQ ID NO: 7660 - protein, 40 aa, Artificial Sequence
  Description of Artificial Sequence: Synthetic polypeptide
DNYHFYSSIPSMEKEVGNCSPHFLNAFEDSFSSILSTEDP

SEQ ID NO: 7661 - protein, 40 aa, Artificial Sequence
  Description of Artificial Sequence: Synthetic polypeptide
YHFYSSIPSMEKEVGNCSPHFLNAFEDSFSSILSTEDPNQ

SEQ ID NO: 7662 - protein, 40 aa, Artificial Sequence
  Description of Artificial Sequence: Synthetic polypeptide
FYSSIPSMEKEVGNCSPHFLNAFEDSFSSILSTEDPNQLT

SEQ ID NO: 7663 - protein, 40 aa, Artificial Sequence
  Description of Artificial Sequence: Synthetic polypeptide
YSSIPSMEKEVGNCSPHFLNAFEDSFSSILSTEDPNQLTV

SEQ ID NO: 7664 - protein, 40 aa, Artificial Sequence
  Description of Artificial Sequence: Synthetic polypeptide
SSIPSMEKEVGNCSPHFLNAFEDSFSSILSTEDPNQLTVN

SEQ ID NO: 7665 - protein, 40 aa, Artificial Sequence
  Description of Artificial Sequence: Synthetic polypeptide
SIPSMEKEVGNCSPHFLNAFEDSFSSILSTEDPNQLTVNS

SEQ ID NO: 7666 - protein, 40 aa, Artificial Sequence
  Description of Artificial Sequence: Synthetic polypeptide
IPSMEKEVGNCSPHFLNAFEDSFSSILSTEDPNQLTVNSL

SEQ ID NO: 7667 - protein, 40 aa, Artificial Sequence
  Description of Artificial Sequence: Synthetic polypeptide
PSMEKEVGNCSPHFLNAFEDSFSSILSTEDPNQLTVNSLN

SEQ ID NO: 7668 - protein, 40 aa, Artificial Sequence
  Description of Artificial Sequence: Synthetic polypeptide
MEKEVGNCSPHFLNAFEDSFSSILSTEDPNQLTVNSLNSD

SEQ ID NO: 7669 - protein, 40 aa, Artificial Sequence
  Description of Artificial Sequence: Synthetic polypeptide
VGNCSPHFLNAFEDSFSSILSTEDPNQLTVNSLNSDATVN

SEQ ID NO: 7670 - protein, 40 aa, Artificial Sequence
  Description of Artificial Sequence: Synthetic polypeptide
SILSTEDPNQLTVNSLNSDATVNTDFGDEFYSAFIAEPSI

SEQ ID NO: 7671 - protein, 40 aa, Artificial Sequence
  Description of Artificial Sequence: Synthetic polypeptide
LSTEDPNQLTVNSLNSDATVNTDFGDEFYSAFIAEPSISN

SEQ ID NO: 7672 - protein, 40 aa, Artificial Sequence
  Description of Artificial Sequence: Synthetic polypeptide
SMPSPATLSHSLSELLNGPIDVSDLSLCKAFNQNHPESTA

SEQ ID NO: 7673 - protein, 40 aa, Artificial Sequence
  Description of Artificial Sequence: Synthetic polypeptide
MPSPATLSHSLSELLNGPIDVSDLSLCKAFNQNHPESTAE

SEQ ID NO: 7674 - protein, 40 aa, Artificial Sequence
  Description of Artificial Sequence: Synthetic polypeptide
ATLSHSLSELLNGPIDVSDLSLCKAFNQNHPESTAEFNDS

SEQ ID NO: 7675 - protein, 40 aa, Artificial Sequence
  Description of Artificial Sequence: Synthetic polypeptide
VHDAQCENTPEKELPVSPGHRKTPFTKDKHSSRLEAHLTR

SEQ ID NO: 7676 - protein, 40 aa, Artificial Sequence
  Description of Artificial Sequence: Synthetic polypeptide
HDAQCENTPEKELPVSPGHRKTPFTKDKHSSRLEAHLTRD

SEQ ID NO: 7677 - protein, 40 aa, Artificial Sequence
  Description of Artificial Sequence: Synthetic polypeptide
TPEKELPVSPGHRKTPFTKDKHSSRLEAHLTRDELRAKAL

SEQ ID NO: 7678 - protein, 40 aa, Artificial Sequence
  Description of Artificial Sequence: Synthetic polypeptide
RKTPFTKDKHSSRLEAHLTRDELRAKALHIPFPVEKIINL

SEQ ID NO: 7679 - protein, 40 aa, Artificial Sequence
  Description of Artificial Sequence: Synthetic polypeptide
KTPFTKDKHSSRLEAHLTRDELRAKALHIPFPVEKIINLP

SEQ ID NO: 7680 - protein, 40 aa, Artificial Sequence
  Description of Artificial Sequence: Synthetic polypeptide
KHSSRLEAHLTRDELRAKALHIPFPVEKIINLPVVDFNEM

SEQ ID NO: 7681 - protein, 40 aa, Artificial Sequence
  Description of Artificial Sequence: Synthetic polypeptide
FPVEKIINLPVVDFNEMMSKEQFNEAQLALIRDIRRRGKN

SEQ ID NO: 7682 - protein, 40 aa, Artificial Sequence
  Description of Artificial Sequence: Synthetic polypeptide
IINLPVVDFNEMMSKEQFNEAQLALIRDIRRRGKNKVAAQ

SEQ ID NO: 7683 - protein, 40 aa, Artificial Sequence
  Description of Artificial Sequence: Synthetic polypeptide
VVDFNEMMSKEQFNEAQLALIRDIRRRGKNKVAAQNCRKR

SEQ ID NO: 7684 - protein, 40 aa, Artificial Sequence
  Description of Artificial Sequence: Synthetic polypeptide
VDFNEMMSKEQFNEAQLALIRDIRRRGKNKVAAQNCRKRK

SEQ ID NO: 7685 - protein, 40 aa, Artificial Sequence
  Description of Artificial Sequence: Synthetic polypeptide
DFNEMMSKEQFNEAQLALIRDIRRRGKNKVAAQNCRKRKL

SEQ ID NO: 7686 - protein, 40 aa, Artificial Sequence
  Description of Artificial Sequence: Synthetic polypeptide
FNEMMSKEQFNEAQLALIRDIRRRGKNKVAAQNCRKRKLE

SEQ ID NO: 7687 - protein, 40 aa, Artificial Sequence
  Description of Artificial Sequence: Synthetic polypeptide
EMMSKEQFNEAQLALIRDIRRRGKNKVAAQNCRKRKLENI

SEQ ID NO: 7688 - protein, 40 aa, Artificial Sequence
  Description of Artificial Sequence: Synthetic polypeptide
MMSKEQFNEAQLALIRDIRRRGKNKVAAQNCRKRKLENIV

SEQ ID NO: 7689 - protein, 40 aa, Artificial Sequence
  Description of Artificial Sequence: Synthetic polypeptide
MSKEQFNEAQLALIRDIRRRGKNKVAAQNCRKRKLENIVE

SEQ ID NO: 7690 - protein, 40 aa, Artificial Sequence
  Description of Artificial Sequence: Synthetic polypeptide
SKEQFNEAQLALIRDIRRRGKNKVAAQNCRKRKLENIVEL

SEQ ID NO: 7691 - protein, 40 aa, Artificial Sequence
  Description of Artificial Sequence: Synthetic polypeptide
IRRRGKNKVAAQNCRKRKLENIVELEQDLDHLKDEKEKLL

SEQ ID NO: 7692 - protein, 40 aa, Artificial Sequence
  Description of Artificial Sequence: Synthetic polypeptide
EKGENDKSLHLLKKQLSTLYLEVFSMLRDEDGKPYSPSEY

SEQ ID NO: 7693 - protein, 40 aa, Artificial Sequence
  Description of Artificial Sequence: Synthetic polypeptide
KGENDKSLHLLKKQLSTLYLEVFSMLRDEDGKPYSPSEYS

SEQ ID NO: 7694 - protein, 40 aa, Artificial Sequence
  Description of Artificial Sequence: Synthetic polypeptide
KKQLSTLYLEVFSMLRDEDGKPYSPSEYSLQQTRDGNVFL

SEQ ID NO: 7695 - protein, 40 aa, Artificial Sequence
  Description of Artificial Sequence: Synthetic polypeptide
PSSDESSLETSPPDSSQRPSARPASPGSDAEKRKKRRVLF

SEQ ID NO: 7696 - protein, 40 aa, Artificial Sequence
  Description of Artificial Sequence: Synthetic polypeptide
SSQRPSARPASPGSDAEKRKKRRVLFSKAQTLELERRFRQ

SEQ ID NO: 7697 - protein, 40 aa, Artificial Sequence
  Description of Artificial Sequence: Synthetic polypeptide
PGSDAEKRKKRRVLFSKAQTLELERRFRQQRYLSAPEREQ

SEQ ID NO: 7698 - protein, 40 aa, Artificial Sequence
  Description of Artificial Sequence: Synthetic polypeptide
AAESPDLAASAELHAAPGLLRRVVVPVLVRDGQPCGGGGG

SEQ ID NO: 7699 - protein, 40 aa, Artificial Sequence
  Description of Artificial Sequence: Synthetic polypeptide
VPVLVRDGQPCGGGGGGEVGTAAAQEKCGAPPAAACPLPG

SEQ ID NO: 7700 - protein, 40 aa, Artificial Sequence
  Description of Artificial Sequence: Synthetic polypeptide
PVLVRDGQPCGGGGGGEVGTAAAQEKCGAPPAAACPLPGY

SEQ ID NO: 7701 - protein, 40 aa, Artificial Sequence
  Description of Artificial Sequence: Synthetic polypeptide
VLVRDGQPCGGGGGGEVGTAAAQEKCGAPPAAACPLPGYP

SEQ ID NO: 7702 - protein, 40 aa, Artificial Sequence
  Description of Artificial Sequence: Synthetic polypeptide
DGQPCGGGGGGEVGTAAAQEKCGAPPAAACPLPGYPAFGP

SEQ ID NO: 7703 - protein, 40 aa, Artificial Sequence
  Description of Artificial Sequence: Synthetic polypeptide
GQPCGGGGGGEVGTAAAQEKCGAPPAAACPLPGYPAFGPG

SEQ ID NO: 7704 - protein, 40 aa, Artificial Sequence
  Description of Artificial Sequence: Synthetic polypeptide
QPCGGGGGGEVGTAAAQEKCGAPPAAACPLPGYPAFGPGS

SEQ ID NO: 7705 - protein, 40 aa, Artificial Sequence
  Description of Artificial Sequence: Synthetic polypeptide
PCGGGGGGEVGTAAAQEKCGAPPAAACPLPGYPAFGPGSA

SEQ ID NO: 7706 - protein, 40 aa, Artificial Sequence
  Description of Artificial Sequence: Synthetic polypeptide
CGGGGGGEVGTAAAQEKCGAPPAAACPLPGYPAFGPGSAL

SEQ ID NO: 7707 - protein, 40 aa, Artificial Sequence
  Description of Artificial Sequence: Synthetic polypeptide
GGGGGGEVGTAAAQEKCGAPPAAACPLPGYPAFGPGSALG

SEQ ID NO: 7708 - protein, 40 aa, Artificial Sequence
  Description of Artificial Sequence: Synthetic polypeptide
GGGEVGTAAAQEKCGAPPAAACPLPGYPAFGPGSALGLFP

SEQ ID NO: 7709 - protein, 40 aa, Artificial Sequence
  Description of Artificial Sequence: Synthetic polypeptide
GGEVGTAAAQEKCGAPPAAACPLPGYPAFGPGSALGLFPA

SEQ ID NO: 7710 - protein, 40 aa, Artificial Sequence
  Description of Artificial Sequence: Synthetic polypeptide
EVGTAAAQEKCGAPPAAACPLPGYPAFGPGSALGLFPAYQ

SEQ ID NO: 7711 - protein, 40 aa, Artificial Sequence
  Description of Artificial Sequence: Synthetic polypeptide
VGTAAAQEKCGAPPAAACPLPGYPAFGPGSALGLFPAYQH

SEQ ID NO: 7712 - protein, 40 aa, Artificial Sequence
  Description of Artificial Sequence: Synthetic polypeptide
GTAAAQEKCGAPPAAACPLPGYPAFGPGSALGLFPAYQHL

SEQ ID NO: 7713 - protein, 40 aa, Artificial Sequence
  Description of Artificial Sequence: Synthetic polypeptide
LLAPLLCLALLPALAARGPRCSQPGETCLNGGKCEAANGT

SEQ ID NO: 7714 - protein, 40 aa, Artificial Sequence
  Description of Artificial Sequence: Synthetic polypeptide
APLLCLALLPALAARGPRCSQPGETCLNGGKCEAANGTEA

SEQ ID NO: 7715 - protein, 40 aa, Artificial Sequence
  Description of Artificial Sequence: Synthetic polypeptide
RCSQPGETCLNGGKCEAANGTEACVCGGAFVGPRCQDPNP

SEQ ID NO: 7716 - protein, 40 aa, Artificial Sequence
  Description of Artificial Sequence: Synthetic polypeptide
NCEENIDDCPGNNCKNGGACVDGVNTYNCRCPPEWTGQYC

SEQ ID NO: 7717 - protein, 40 aa, Artificial Sequence
  Description of Artificial Sequence: Synthetic polypeptide
NIDDCPGNNCKNGGACVDGVNTYNCRCPPEWTGQYCTEDV

SEQ ID NO: 7718 - protein, 40 aa, Artificial Sequence
  Description of Artificial Sequence: Synthetic polypeptide
DDCPGNNCKNGGACVDGVNTYNCRCPPEWTGQYCTEDVDE

SEQ ID NO: 7719 - protein, 40 aa, Artificial Sequence
  Description of Artificial Sequence: Synthetic polypeptide
DCPGNNCKNGGACVDGVNTYNCRCPPEWTGQYCTEDVDEC

SEQ ID NO: 7720 - protein, 40 aa, Artificial Sequence
  Description of Artificial Sequence: Synthetic polypeptide
CPGNNCKNGGACVDGVNTYNCRCPPEWTGQYCTEDVDECQ

SEQ ID NO: 7721 - protein, 40 aa, Artificial Sequence
  Description of Artificial Sequence: Synthetic polypeptide
NGGACVDGVNTYNCRCPPEWTGQYCTEDVDECQLMPNACQ

SEQ ID NO: 7722 - protein, 40 aa, Artificial Sequence
  Description of Artificial Sequence: Synthetic polypeptide
CESNPCVNGGTCKDMTSGYVCTCREGFSGPNCQTNINECA

SEQ ID NO: 7723 - protein, 40 aa, Artificial Sequence
  Description of Artificial Sequence: Synthetic polypeptide
CWQTHTQYRCECPSGWTGLYCDVPSVSCEVAAQRQGVDVA

SEQ ID NO: 7724 - protein, 40 aa, Artificial Sequence
  Description of Artificial Sequence: Synthetic polypeptide
DVPSVSCEVAAQRQGVDVARLCQHGGLCVDAGNTHHCRCQ

SEQ ID NO: 7725 - protein, 40 aa, Artificial Sequence
  Description of Artificial Sequence: Synthetic polypeptide
VPSVSCEVAAQRQGVDVARLCQHGGLCVDAGNTHHCRCQA

SEQ ID NO: 7726 - protein, 40 aa, Artificial Sequence
  Description of Artificial Sequence: Synthetic polypeptide
AAQRQGVDVARLCQHGGLCVDAGNTHHCRCQAGYTGSYCE

SEQ ID NO: 7727 - protein, 40 aa, Artificial Sequence
  Description of Artificial Sequence: Synthetic polypeptide
DDCNPPVDPVSRSPKCFNNGTCVDQVGGYSCTCPPGFVGE

SEQ ID NO: 7728 - protein, 40 aa, Artificial Sequence
  Description of Artificial Sequence: Synthetic polypeptide
CTCPPGFVGERCEGDVNECLSNPCDARGTQNCVQRVNDFH

SEQ ID NO: 7729 - protein, 40 aa, Artificial Sequence
  Description of Artificial Sequence: Synthetic polypeptide
ERCEGDVNECLSNPCDARGTQNCVQRVNDFHCECRAGHTG

SEQ ID NO: 7730 - protein, 40 aa, Artificial Sequence
  Description of Artificial Sequence: Synthetic polypeptide
SNPCDARGTQNCVQRVNDFHCECRAGHTGRRCESVINGCK

SEQ ID NO: 7731 - protein, 40 aa, Artificial Sequence
  Description of Artificial Sequence: Synthetic polypeptide
ARGTQNCVQRVNDFHCECRAGHTGRRCESVINGCKGKPCK

SEQ ID NO: 7732 - protein, 40 aa, Artificial Sequence
  Description of Artificial Sequence: Synthetic polypeptide
GGTCAVASNTARGFICKCPAGFEGATCENDARTCGSLRCL

SEQ ID NO: 7733 - protein, 40 aa, Artificial Sequence
  Description of Artificial Sequence: Synthetic polypeptide
AGRDIPPPLIEEACELPECQEDAGNKVCSLQCNNHACGWD

SEQ ID NO: 7734 - protein, 40 aa, Artificial Sequence
  Description of Artificial Sequence: Synthetic polypeptide
VPERLAAGTLVVVVLMPPEQLRNSSFHFLRELSRVLHTNV

SEQ ID NO: 7735 - protein, 40 aa, Artificial Sequence
  Description of Artificial Sequence: Synthetic polypeptide
PPEQLRNSSFHFLRELSRVLHTNVVFKRDAHGQQMIFPYY

SEQ ID NO: 7736 - protein, 40 aa, Artificial Sequence
  Description of Artificial Sequence: Synthetic polypeptide
AEGWAAPDALLGQVKASLLPGGSEGGRRRRELDPMDVRGS

SEQ ID NO: 7737 - protein, 40 aa, Artificial Sequence
  Description of Artificial Sequence: Synthetic polypeptide
GWAAPDALLGQVKASLLPGGSEGGRRRRELDPMDVRGSIV

SEQ ID NO: 7738 - protein, 40 aa, Artificial Sequence
  Description of Artificial Sequence: Synthetic polypeptide
PDALLGQVKASLLPGGSEGGRRRRELDPMDVRGSIVYLEI

SEQ ID NO: 7739 - protein, 40 aa, Artificial Sequence
  Description of Artificial Sequence: Synthetic polypeptide
DALLGQVKASLLPGGSEGGRRRRELDPMDVRGSIVYLEID

SEQ ID NO: 7740 - protein, 40 aa, Artificial Sequence
  Description of Artificial Sequence: Synthetic polypeptide
TVEPPPPAQLHFMYVAAAAFVLLFFVGCGVLLSRKRRRQH

SEQ ID NO: 7741 - protein, 40 aa, Artificial Sequence
  Description of Artificial Sequence: Synthetic polypeptide
PPAQLHFMYVAAAAFVLLFFVGCGVLLSRKRRRQHGQLWF

SEQ ID NO: 7742 - protein, 40 aa, Artificial Sequence
  Description of Artificial Sequence: Synthetic polypeptide
PAQLHFMYVAAAAFVLLFFVGCGVLLSRKRRRQHGQLWFP

SEQ ID NO: 7743 - protein, 40 aa, Artificial Sequence
  Description of Artificial Sequence: Synthetic polypeptide
MHFMYVAAAAFVLLFFVGCGVLLSRKRRRQHGQLWFPEGF

SEQ ID NO: 7744 - protein, 40 aa, Artificial Sequence
  Description of Artificial Sequence: Synthetic polypeptide
MYVAAAAFVLLFFVGCGVLLSRKRRRQHGQLWFPEGFKVS

SEQ ID NO: 7745 - protein, 40 aa, Artificial Sequence
  Description of Artificial Sequence: Synthetic polypeptide
KRRRQHGQLWFPEGFKVSEASKKKRREPLGEDSVGLKPLK

SEQ ID NO: 7746 - protein, 40 aa, Artificial Sequence
  Description of Artificial Sequence: Synthetic polypeptide
QLWFPEGFKVSEASKKKRREPLGEDSVGLKPLKNASDGAL

SEQ ID NO: 7747 - protein, 40 aa, Artificial Sequence
  Description of Artificial Sequence: Synthetic polypeptide
LWFPEGFKVSEASKKKRREPLGEDSVGLKPLKNASDGALM

SEQ ID NO: 7748 - protein, 40 aa, Artificial Sequence
  Description of Artificial Sequence: Synthetic polypeptide
ADAQGVFQILIRNRATDLDARMHDGTTPLILAARLAVEGM

SEQ ID NO: 7749 - protein, 40 aa, Artificial Sequence
  Description of Artificial Sequence: Synthetic polypeptide
ALGGGGRLAFETGPPRLSHLPVASGTSTVLGSSSGGALNF

SEQ ID NO: 7750 - protein, 40 aa, Artificial Sequence
  Description of Artificial Sequence: Synthetic polypeptide
MQHGMVGPLHSSLAASALSQMMSYQGLPSTRLATQPHLVQ

SEQ ID NO: 7751 - protein, 40 aa, Artificial Sequence
  Description of Artificial Sequence: Synthetic polypeptide
QPQNLQMQQQNLQPANIQQQQSLQPPPPPPQPHLGVSSAA

SEQ ID NO: 7752 - protein, 40 aa, Artificial Sequence
  Description of Artificial Sequence: Synthetic polypeptide
QSLQPPPPPPQPHLGVSSAASGHLGRSFLSGEPSQADVQP

SEQ ID NO: 7753 - protein, 40 aa, Artificial Sequence
  Description of Artificial Sequence: Synthetic polypeptide
TAGQEEYSAMRDQYMRTGEGFLCVFAINNSKSFADINLYR

SEQ ID NO: 7754 - protein, 40 aa, Artificial Sequence
  Description of Artificial Sequence: Synthetic polypeptide
EYSAMRDQYMRTGEGFLCVFAINNSKSFADINLYREQIKR

SEQ ID NO: 7755 - protein, 40 aa, Artificial Sequence
  Description of Artificial Sequence: Synthetic polypeptide
RDQYMRTGEGFLCVFAINNSKSFADINLYREQIKRVKDSD

SEQ ID NO: 7756 - protein, 40 aa, Artificial Sequence
  Description of Artificial Sequence: Synthetic polypeptide
VFAINNSKSFADINLYREQIKRVKDSDDVPMVLVGNKCDL

SEQ ID NO: 7757 - protein, 40 aa, Artificial Sequence
  Description of Artificial Sequence: Synthetic polypeptide
FAINNSKSFADINLYREQIKRVKDSDDVPMVLVGNKCDLP

SEQ ID NO: 7758 - protein, 40 aa, Artificial Sequence
  Description of Artificial Sequence: Synthetic polypeptide
INNSKSFADINLYREQIKRVKDSDDVPMVLVGNKCDLPTR

SEQ ID NO: 7759 - protein, 40 aa, Artificial Sequence
  Description of Artificial Sequence: Synthetic polypeptide
TRTVDTKQAHELAKSYGIPFIETSAKTRQGVEDAFYTLVR

SEQ ID NO: 7760 - protein, 40 aa, Artificial Sequence
  Description of Artificial Sequence: Synthetic polypeptide
RTVDTKQAHELAKSYGIPFIETSAKTRQGVEDAFYTLVRE

SEQ ID NO: 7761 - protein, 40 aa, Artificial Sequence
  Description of Artificial Sequence: Synthetic polypeptide
TVDTKQAHELAKSYGIPFIETSAKTRQGVEDAFYTLVREI

SEQ ID NO: 7762 - protein, 40 aa, Artificial Sequence
  Description of Artificial Sequence: Synthetic polypeptide
DTKQAHELAKSYGIPFIETSAKTRQGVEDAFYTLVREIRQ

SEQ ID NO: 7763 - protein, 40 aa, Artificial Sequence
  Description of Artificial Sequence: Synthetic polypeptide
MAKSYGIPFIETSAKTRQGVEDAFYTLVREIRQYRMKKLN

SEQ ID NO: 7764 - protein, 40 aa, Artificial Sequence
  Description of Artificial Sequence: Synthetic polypeptide
SYGIPFIETSAKTRQGVEDAFYTLVREIRQYRMKKLNSSD

SEQ ID NO: 7765 - protein, 40 aa, Artificial Sequence
  Description of Artificial Sequence: Synthetic polypeptide
ETSAKTRQGVEDAFYTLVREIRQYRMKKLNSSDDGTQGCM

SEQ ID NO: 7766 - protein, 40 aa, Artificial Sequence
  Description of Artificial Sequence: Synthetic polypeptide
TSAKTRQGVEDAFYTLVREIRQYRMKKLNSSDDGTQGCMG

SEQ ID NO: 7767 - protein, 40 aa, Artificial Sequence
  Description of Artificial Sequence: Synthetic polypeptide
AKTRQGVEDAFYTLVREIRQYRMKKLNSSDDGTQGCMGLP

SEQ ID NO: 7768 - protein, 40 aa, Artificial Sequence
  Description of Artificial Sequence: Synthetic polypeptide
KTRQGVEDAFYTLVREIRQYRMKKLNSSDDGTQGCMGLPC

SEQ ID NO: 7769 - protein, 40 aa, Artificial Sequence; identical to SEQ ID NO: 3225
  Description of Artificial Sequence: Synthetic polypeptide

SEQ ID NO: 7770 - protein, 40 aa, Artificial Sequence
  Description of Artificial Sequence: Synthetic polypeptide
QVVIDGETCLLDILDTAGLEEYSAMRDQYMRTGEGFLCVF

SEQ ID NO: 7771 - protein, 40 aa, Artificial Sequence
  Description of Artificial Sequence: Synthetic polypeptide
TAGLEEYSAMRDQYMRTGEGFLCVFAINNSKSFADINLYR

SEQ ID NO: 7772 - protein, 40 aa, Artificial Sequence
  Description of Artificial Sequence: Synthetic polypeptide
KRSFFALRDQIPELENNEKAPKVVILKKATAYILSVQAET

SEQ ID NO: 7773 - protein, 40 aa, Artificial Sequence
  Description of Artificial Sequence: Synthetic polypeptide
RSFFALRDQIPELENNEKAPKVVILKKATAYILSVQAETQ

SEQ ID NO: 7774 - protein, 40 aa, Artificial Sequence
  Description of Artificial Sequence: Synthetic polypeptide
SFFALRDQIPELENNEKAPKVVILKKATAYILSVQAETQK

SEQ ID NO: 7775 - protein, 40 aa, Artificial Sequence
  Description of Artificial Sequence: Synthetic polypeptide
FFALRDQIPELENNEKAPKVVILKKATAYILSVQAETQKL

SEQ ID NO: 7776 - protein, 40 aa, Artificial Sequence
  Description of Artificial Sequence: Synthetic polypeptide
ALRDQIPELENNEKAPKVVILKKATAYILSVQAETQKLIS

SEQ ID NO: 7777 - protein, 40 aa, Artificial Sequence
  Description of Artificial Sequence: Synthetic polypeptide
DQIPELENNEKAPKVVILKKATAYILSVQAETQKLISEID

SEQ ID NO: 7778 - protein, 40 aa, Artificial Sequence
  Description of Artificial Sequence: Synthetic polypeptide
QIPELENNEKAPKVVILKKATAYILSVQAETQKLISEIDL

SEQ ID NO: 7779 - protein, 40 aa, Artificial Sequence
  Description of Artificial Sequence: Synthetic polypeptide
IPELENNEKAPKVVILKKATAYILSVQAETQKLISEIDLL

SEQ ID NO: 7780 - protein, 40 aa, Artificial Sequence
  Description of Artificial Sequence: Synthetic polypeptide
PELENNEKAPKVVILKKATAYILSVQAETQKLISEIDLLR

SEQ ID NO: 7781 - protein, 40 aa, Artificial Sequence
  Description of Artificial Sequence: Synthetic polypeptide
NNEKAPKVVILKKATAYILSVQAETQKLISEIDLLRKQNE

SEQ ID NO: 7782 - protein, 40 aa, Artificial Sequence
  Description of Artificial Sequence: Synthetic polypeptide
NEKAPKVVILKKATAYILSVQAETQKLISEIDLLRKQNEQ

SEQ ID NO: 7783 - protein, 40 aa, Artificial Sequence
  Description of Artificial Sequence: Synthetic polypeptide
RPSSGELWGIHLMPPRILVECLLPNGMIVTLECLREATLI

SEQ ID NO: 7784 - protein, 40 aa, Artificial Sequence
  Description of Artificial Sequence: Synthetic polypeptide
SSGELWGIHLMPPRILVECLLPNGMIVTLECLREATLITI

SEQ ID NO: 7785 - protein, 40 aa, Artificial Sequence
  Description of Artificial Sequence: Synthetic polypeptide
SGELWGIHLMPPRILVECLLPNGMIVTLECLREATLITIK

SEQ ID NO: 7786 - protein, 40 aa, Artificial Sequence
  Description of Artificial Sequence: Synthetic polypeptide
GELWGIHLMPPRILVECLLPNGMIVTLECLREATLITIKH

SEQ ID NO: 7787 - protein, 40 aa, Artificial Sequence
  Description of Artificial Sequence: Synthetic polypeptide
LVECLLPNGMIVTLECLREATLITIKHELFKEARKYPLHQ

SEQ ID NO: 7788 - protein, 40 aa, Artificial Sequence
  Description of Artificial Sequence: Synthetic polypeptide
CLLPNGMIVTLECLREATLITIKHELFKEARKYPLHQLLQ

SEQ ID NO: 7789 - protein, 40 aa, Artificial Sequence
  Description of Artificial Sequence: Synthetic polypeptide
LLPNGMIVTLECLREATLITIKHELFKEARKYPLHQLLQD

SEQ ID NO: 7790 - protein, 40 aa, Artificial Sequence
  Description of Artificial Sequence: Synthetic polypeptide
LREATLITIKHELFKEARKYPLHQLLQDESSYIFVSVTQE

SEQ ID NO: 7791 - protein, 40 aa, Artificial Sequence
  Description of Artificial Sequence: Synthetic polypeptide
REATLITIKHELFKEARKYPLHQLLQDESSYIFVSVTQEA

SEQ ID NO: 7792 - protein, 40 aa, Artificial Sequence
  Description of Artificial Sequence: Synthetic polypeptide
LFKEARKYPLHQLLQDESSYIFVSVTQEAEREEFFDETRR

SEQ ID NO: 7793 - protein, 40 aa, Artificial Sequence
  Description of Artificial Sequence: Synthetic polypeptide
ARKYPLHQLLQDESSYIFVSVTQEAEREEFFDETRRLCDL

SEQ ID NO: 7794 - protein, 40 aa, Artificial Sequence
  Description of Artificial Sequence: Synthetic polypeptide
RKYPLHQLLQDESSYIFVSVTQEAEREEFFDETRRLCDLR

SEQ ID NO: 7795 - protein, 40 aa, Artificial Sequence
  Description of Artificial Sequence: Synthetic polypeptide
PLHQLLQDESSYIFVSVTQEAEREEFFDETRRLCDLRLFQ

SEQ ID NO: 7796 - protein, 40 aa, Artificial Sequence
  Description of Artificial Sequence: Synthetic polypeptide
SSYIFVSVTQEAEREEFFDETRRLCDLRLFQPFLKVIEPV

SEQ ID NO: 7797 - protein, 40 aa, Artificial Sequence
  Description of Artificial Sequence: Synthetic polypeptide
SYIFVSVTQEAEREEFFDETRRLCDLRLFQPFLKVIEPVG

SEQ ID NO: 7798 - protein, 40 aa, Artificial Sequence
  Description of Artificial Sequence: Synthetic polypeptide
IFVSVTQEAEREEFFDETRRLCDLRLFQPFLKVIEPVGNR

SEQ ID NO: 7799 - protein, 40 aa, Artificial Sequence
  Description of Artificial Sequence: Synthetic polypeptide
FVSVTQEAEREEFFDETRRLCDLRLFQPFLKVIEPVGNRE

SEQ ID NO: 7800 - protein, 40 aa, Artificial Sequence
  Description of Artificial Sequence: Synthetic polypeptide
VSVTQEAEREEFFDETRRLCDLRLFQPFLKVIEPVGNREE

SEQ ID NO: 7801 - protein, 40 aa, Artificial Sequence
  Description of Artificial Sequence: Synthetic polypeptide
SVTQEAEREEFFDETRRLCDLRLFQPFLKVIEPVGNREEK

SEQ ID NO: 7802 - protein, 40 aa, Artificial Sequence
  Description of Artificial Sequence: Synthetic polypeptide
VTQEAEREEFFDETRRLCDLRLFQPFLKVIEPVGNREEKI

SEQ ID NO: 7803 - protein, 40 aa, Artificial Sequence
  Description of Artificial Sequence: Synthetic polypeptide
QEAEREEFFDETRRLCDLRLFQPFLKVIEPVGNREEKILN

SEQ ID NO: 7804 - protein, 40 aa, Artificial Sequence
  Description of Artificial Sequence: Synthetic polypeptide
REEFFDETRRLCDLRLFQPFLKVIEPVGNREEKILNREIG

SEQ ID NO: 7805 - protein, 40 aa, Artificial Sequence
  Description of Artificial Sequence: Synthetic polypeptide
EEFFDETRRLCDLRLFQPFLKVIEPVGNREEKILNREIGF

SEQ ID NO: 7806 - protein, 40 aa, Artificial Sequence
  Description of Artificial Sequence: Synthetic polypeptide
FFDETRRLCDLRLFQPFLKVIEPVGNREEKILNREIGFAI

SEQ ID NO: 7807 - protein, 40 aa, Artificial Sequence
  Description of Artificial Sequence: Synthetic polypeptide
FDETRRLCDLRLFQPFLKVIEPVGNREEKILNREIGFAIG

SEQ ID NO: 7808 - protein, 40 aa, Artificial Sequence
  Description of Artificial Sequence: Synthetic polypeptide
DETRRLCDLRLFQPFLKVIEPVGNREEKILNREIGFAIGM

SEQ ID NO: 7809 - protein, 40 aa, Artificial Sequence
  Description of Artificial Sequence: Synthetic polypeptide
ETRRLCDLRLFQPFLKVIEPVGNREEKILNREIGFAIGMP

SEQ ID NO: 7810 - protein, 40 aa, Artificial Sequence
  Description of Artificial Sequence: Synthetic polypeptide
LCDLRLFQPFLKVIEPVGNREEKILNREIGFAIGMPVCEF

SEQ ID NO: 7811 - protein, 40 aa, Artificial Sequence
  Description of Artificial Sequence: Synthetic polypeptide
RLFQPFLKVIEPVGNREEKILNREIGFAIGMPVCEFDMVK

SEQ ID NO: 7812 - protein, 40 aa, Artificial Sequence
  Description of Artificial Sequence: Synthetic polypeptide
FQPFLKVIEPVGNREEKILNREIGFAIGMPVCEFDMVKDP

SEQ ID NO: 7813 - protein, 40 aa, Artificial Sequence
  Description of Artificial Sequence: Synthetic polypeptide
QPFLKVIEPVGNREEKILNREIGFAIGMPVCEFDMVKDPE

SEQ ID NO: 7814 - protein, 40 aa, Artificial Sequence
  Description of Artificial Sequence: Synthetic polypeptide
REIGFAIGMPVCEFDMVKDPEVQDFRRNILNVCKEAVDLR

SEQ ID NO: 7815 - protein, 40 aa, Artificial Sequence
  Description of Artificial Sequence: Synthetic polypeptide
PVCEFDMVKDPEVQDFRRNILNVCKEAVDLRDLNSPHSRA

SEQ ID NO: 7816 - protein, 40 aa, Artificial Sequence
  Description of Artificial Sequence: Synthetic polypeptide
CEFDMVKDPEVQDFRRNILNVCKEAVDLRDLNSPHSRAMY

SEQ ID NO: 7817 - protein, 40 aa, Artificial Sequence
  Description of Artificial Sequence: Synthetic polypeptide
EVQDFRRNILNVCKEAVDLRDLNSPHSRAMYVYPPNVESS

SEQ ID NO: 7818 - protein, 40 aa, Artificial Sequence
  Description of Artificial Sequence: Synthetic polypeptide
ILNVCKEAVDLRDLNSPHSRAMYVYPPNVESSPELPKHIY

SEQ ID NO: 7819 - protein, 40 aa, Artificial Sequence
  Description of Artificial Sequence: Synthetic polypeptide
MNVCKEAVDLRDLNSPHSRAMYVYPPNVESSPELPKHIYN

SEQ ID NO: 7820 - protein, 40 aa, Artificial Sequence
  Description of Artificial Sequence: Synthetic polypeptide
NVCKEAVDLRDLNSPHSRAMYVYPPNVESSPELPKHIYNK

SEQ ID NO: 7821 - protein, 40 aa, Artificial Sequence
  Description of Artificial Sequence: Synthetic polypeptide
CKEAVDLRDLNSPHSRAMYVYPPNVESSPELPKHIYNKLD

SEQ ID NO: 7822 - protein, 40 aa, Artificial Sequence
  Description of Artificial Sequence: Synthetic polypeptide
RDLNSPHSRAMYVYPPNVESSPELPKHIYNKLDKGQIIVV

SEQ ID NO: 7823 - protein, 40 aa, Artificial Sequence
  Description of Artificial Sequence: Synthetic polypeptide
DLNSPHSRAMYVYPPNVESSPELPKHIYNKLDKGQIIVVI

SEQ ID NO: 7824 - protein, 40 aa, Artificial Sequence
  Description of Artificial Sequence: Synthetic polypeptide
PHSRAMYVYPPNVESSPELPKHIYNKLDKGQIIVVIWVIV

SEQ ID NO: 7825 - protein, 40 aa, Artificial Sequence
  Description of Artificial Sequence: Synthetic polypeptide
SPELPKHIYNKLDKGQIIVVIWVIVSPNNDKQKYTLKINH

SEQ ID NO: 7826 - protein, 40 aa, Artificial Sequence
  Description of Artificial Sequence: Synthetic polypeptide
MPKHIYNKLDKGQIIVVIWVIVSPNNDKQKYTLKINHDCV

SEQ ID NO: 7827 - protein, 40 aa, Artificial Sequence
  Description of Artificial Sequence: Synthetic polypeptide
HIYNKLDKGQIIVVIWVIVSPNNDKQKYTLKINHDCVPEQ

SEQ ID NO: 7828 - protein, 40 aa, Artificial Sequence
  Description of Artificial Sequence: Synthetic polypeptide
NKLDKGQIIVVIWVIVSPNNDKQKYTLKINHDCVPEQVIA

SEQ ID NO: 7829 - protein, 40 aa, Artificial Sequence
  Description of Artificial Sequence: Synthetic polypeptide
KLDKGQIIVVIWVIVSPNNDKQKYTLKINHDCVPEQVIAE

SEQ ID NO: 7830 - protein, 40 aa, Artificial Sequence
  Description of Artificial Sequence: Synthetic polypeptide
DKGQIIVVIWVIVSPNNDKQKYTLKINHDCVPEQVIAEAI

SEQ ID NO: 7831 - protein, 40 aa, Artificial Sequence
  Description of Artificial Sequence: Synthetic polypeptide
IWVIVSPNNDKQKYTLKINHDCVPEQVIAEAIRKKTRSML

SEQ ID NO: 7832 - protein, 40 aa, Artificial Sequence
  Description of Artificial Sequence: Synthetic polypeptide
INHDCVPEQVIAEAIRKKTRSMLLSSEQLKLCVLEYQGKY

SEQ ID NO: 7833 - protein, 40 aa, Artificial Sequence
  Description of Artificial Sequence: Synthetic polypeptide
NHDCVPEQVIAEAIRKKTRSMLLSSEQLKLCVLEYQGKYI

SEQ ID NO: 7834 - protein, 40 aa, Artificial Sequence
  Description of Artificial Sequence: Synthetic polypeptide
HDCVPEQVIAEAIRKKTRSMLLSSEQLKLCVLEYQGKYIL

SEQ ID NO: 7835 - protein, 40 aa, Artificial Sequence
  Description of Artificial Sequence: Synthetic polypeptide
DCVPEQVIAEAIRKKTRSMLLSSEQLKLCVLEYQGKYILK

SEQ ID NO: 7836 - protein, 40 aa, Artificial Sequence
  Description of Artificial Sequence: Synthetic polypeptide
CVPEQVIAEAIRKKTRSMLLSSEQLKLCVLEYQGKYILKV

SEQ ID NO: 7837 - protein, 40 aa, Artificial Sequence
  Description of Artificial Sequence: Synthetic polypeptide
VPEQVIAEAIRKKTRSMLLSSEQLKLCVLEYQGKYILKVC

SEQ ID NO: 7838 - protein, 40 aa, Artificial Sequence
  Description of Artificial Sequence: Synthetic polypeptide
QVIAEAIRKKTRSMLLSSEQLKLCVLEYQGKYILKVCGCD

SEQ ID NO: 7839 - protein, 40 aa, Artificial Sequence
  Description of Artificial Sequence: Synthetic polypeptide
VIAEAIRKKTRSMLLSSEQLKLCVLEYQGKYILKVCGCDE

SEQ ID NO: 7840 - protein, 40 aa, Artificial Sequence
  Description of Artificial Sequence: Synthetic polypeptide
IRKKTRSMLLSSEQLKLCVLEYQGKYILKVCGCDEYFLEK

SEQ ID NO: 7841 - protein, 40 aa, Artificial Sequence
  Description of Artificial Sequence: Synthetic polypeptide
TRSMLLSSEQLKLCVLEYQGKYILKVCGCDEYFLEKYPLS

SEQ ID NO: 7842 - protein, 40 aa, Artificial Sequence
  Description of Artificial Sequence: Synthetic polypeptide
SMLLSSEQLKLCVLEYQGKYILKVCGCDEYFLEKYPLSQY

SEQ ID NO: 7843 - protein, 40 aa, Artificial Sequence
  Description of Artificial Sequence: Synthetic polypeptide
MLLSSEQLKLCVLEYQGKYILKVCGCDEYFLEKYPLSQYK

SEQ ID NO: 7844 - protein, 40 aa, Artificial Sequence
  Description of Artificial Sequence: Synthetic polypeptide
LSSEQLKLCVLEYQGKYILKVCGCDEYFLEKYPLSQYKYI

SEQ ID NO: 7845 - protein, 40 aa, Artificial Sequence
  Description of Artificial Sequence: Synthetic polypeptide
LCVLEYQGKYILKVCGCDEYFLEKYPLSQYKYIRSCIMLG

SEQ ID NO: 7846 - protein, 40 aa, Artificial Sequence
  Description of Artificial Sequence: Synthetic polypeptide
CVLEYQGKYILKVCGCDEYFLEKYPLSQYKYIRSCIMLGR

SEQ ID NO: 7847 - protein, 40 aa, Artificial Sequence
  Description of Artificial Sequence: Synthetic polypeptide
VLEYQGKYILKVCGCDEYFLEKYPLSQYKYIRSCIMLGRM

SEQ ID NO: 7848 - protein, 40 aa, Artificial Sequence
  Description of Artificial Sequence: Synthetic polypeptide
LEYQGKYILKVCGCDEYFLEKYPLSQYKYIRSCIMLGRMP

SEQ ID NO: 7849 - protein, 40 aa, Artificial Sequence
  Description of Artificial Sequence: Synthetic polypeptide
EYQGKYILKVCGCDEYFLEKYPLSQYKYIRSCIMLGRMPN

SEQ ID NO: 7850 - protein, 40 aa, Artificial Sequence
  Description of Artificial Sequence: Synthetic polypeptide
YQGKYILKVCGCDEYFLEKYPLSQYKYIRSCIMLGRMPNL

SEQ ID NO: 7851 - protein, 40 aa, Artificial Sequence
  Description of Artificial Sequence: Synthetic polypeptide
QGKYILKVCGCDEYFLEKYPLSQYKYIRSCIMLGRMPNLM

SEQ ID NO: 7852 - protein, 40 aa, Artificial Sequence
  Description of Artificial Sequence: Synthetic polypeptide
KYILKVCGCDEYFLEKYPLSQYKYIRSCIMLGRMPNLMLM

SEQ ID NO: 7853 - protein, 40 aa, Artificial Sequence
  Description of Artificial Sequence: Synthetic polypeptide
YILKVCGCDEYFLEKYPLSQYKYIRSCIMLGRMPNLMLMA

SEQ ID NO: 7854 - protein, 40 aa, Artificial Sequence
  Description of Artificial Sequence: Synthetic polypeptide
VCGCDEYFLEKYPLSQYKYIRSCIMLGRMPNLMLMAKESL

SEQ ID NO: 7855 - protein, 40 aa, Artificial Sequence
  Description of Artificial Sequence: Synthetic polypeptide
CGCDEYFLEKYPLSQYKYIRSCIMLGRMPNLMLMAKESLY

SEQ ID NO: 7856 - protein, 40 aa, Artificial Sequence
  Description of Artificial Sequence: Synthetic polypeptide
PLSQYKYIRSCIMLGRMPNLMLMAKESLYSQLPMDCFTMP

SEQ ID NO: 7857 - protein, 40 aa, Artificial Sequence
  Description of Artificial Sequence: Synthetic polypeptide
PNLMLMAKESLYSQLPMDCFTMPSYSRRISTATPYMNGET

SEQ ID NO: 7858 - protein, 40 aa, Artificial Sequence
  Description of Artificial Sequence: Synthetic polypeptide
MPSYSRRISTATPYMNGETSTKSLWVINSALRIKILCATY

SEQ ID NO: 7859 - protein, 40 aa, Artificial Sequence
  Description of Artificial Sequence: Synthetic polypeptide
SYSRRISTATPYMNGETSTKSLWVINSALRIKILCATYVN

SEQ ID NO: 7860 - protein, 40 aa, Artificial Sequence
  Description of Artificial Sequence: Synthetic polypeptide
SRRISTATPYMNGETSTKSLWVINSALRIKILCATYVNVN

SEQ ID NO: 7861 - protein, 40 aa, Artificial Sequence
  Description of Artificial Sequence: Synthetic polypeptide
RRISTATPYMNGETSTKSLWVINSALRIKILCATYVNVNI

SEQ ID NO: 7862 - protein, 40 aa, Artificial Sequence
  Description of Artificial Sequence: Synthetic polypeptide
RISTATPYMNGETSTKSLWVINSALRIKILCATYVNVNIR

SEQ ID NO: 7863 - protein, 40 aa, Artificial Sequence
  Description of Artificial Sequence: Synthetic polypeptide
STATPYMNGETSTKSLWVINSALRIKILCATYVNVNIRDI

SEQ ID NO: 7864 - protein, 40 aa, Artificial Sequence
  Description of Artificial Sequence: Synthetic polypeptide
NGETSTKSLWVINSALRIKILCATYVNVNIRDIDKIYVRT

SEQ ID NO: 7865 - protein, 40 aa, Artificial Sequence
  Description of Artificial Sequence: Synthetic polypeptide
GETSTKSLWVINSALRIKILCATYVNVNIRDIDKIYVRTG

SEQ ID NO: 7866 - protein, 40 aa, Artificial Sequence
  Description of Artificial Sequence: Synthetic polypeptide
TSTKSLWVINSALRIKILCATYVNVNIRDIDKIYVRTGIY

SEQ ID NO: 7867 - protein, 40 aa, Artificial Sequence
  Description of Artificial Sequence: Synthetic polypeptide
SLWVINSALRIKILCATYVNVNIRDIDKIYVRTGIYHGGE

SEQ ID NO: 7868 - protein, 40 aa, Artificial Sequence
  Description of Artificial Sequence: Synthetic polypeptide
WVINSALRIKILCATYVNVNIRDIDKIYVRTGIYHGGEPL

SEQ ID NO: 7869 - protein, 40 aa, Artificial Sequence
  Description of Artificial Sequence: Synthetic polypeptide
VINSALRIKILCATYVNVNIRDIDKIYVRTGIYHGGEPLC

SEQ ID NO: 7870 - protein, 40 aa, Artificial Sequence
  Description of Artificial Sequence: Synthetic polypeptide
RIKILCATYVNVNIRDIDKIYVRTGIYHGGEPLCDNVNTQ

SEQ ID NO: 7871 - protein, 40 aa, Artificial Sequence
  Description of Artificial Sequence: Synthetic polypeptide
ATYVNVNIRDIDKIYVRTGIYHGGEPLCDNVNTQRVPCSN

SEQ ID NO: 7872 - protein, 40 aa, Artificial Sequence
  Description of Artificial Sequence: Synthetic polypeptide
YVNVNIRDIDKIYVRTGIYHGGEPLCDNVNTQRVPCSNPR

SEQ ID NO: 7873 - protein, 40 aa, Artificial Sequence
  Description of Artificial Sequence: Synthetic polypeptide
VNVNIRDIDKIYVRTGIYHGGEPLCDNVNTQRVPCSNPRW

SEQ ID NO: 7874 - protein, 40 aa, Artificial Sequence
  Description of Artificial Sequence: Synthetic polypeptide
VNIRDIDKIYVRTGIYHGGEPLCDNVNTQRVPCSNPRWNE

SEQ ID NO: 7875 - protein, 40 aa, Artificial Sequence
  Description of Artificial Sequence: Synthetic polypeptide
DKIYVRTGIYHGGEPLCDNVNTQRVPCSNPRWNEWLNYDI

SEQ ID NO: 7876 - protein, 40 aa, Artificial Sequence
  Description of Artificial Sequence: Synthetic polypeptide
IYVRTGIYHGGEPLCDNVNTQRVPCSNPRWNEWLNYDIYI

SEQ ID NO: 7877 - protein, 40 aa, Artificial Sequence
  Description of Artificial Sequence: Synthetic polypeptide
GIYHGGEPLCDNVNTQRVPCSNPRWNEWLNYDIYIPDLPR

SEQ ID NO: 7878 - protein, 40 aa, Artificial Sequence
  Description of Artificial Sequence: Synthetic polypeptide
TQRVPCSNPRWNEWLNYDIYIPDLPRAARLCLSICSVKGR

SEQ ID NO: 7879 - protein, 40 aa, Artificial Sequence
  Description of Artificial Sequence: Synthetic polypeptide
NPRWNEWLNYDIYIPDLPRAARLCLSICSVKGRKGAKEEH

SEQ ID NO: 7880 - protein, 40 aa, Artificial Sequence
  Description of Artificial Sequence: Synthetic polypeptide
PRWNEWLNYDIYIPDLPRAARLCLSICSVKGRKGAKEEHC

SEQ ID NO: 7881 - protein, 40 aa, Artificial Sequence
  Description of Artificial Sequence: Synthetic polypeptide
PLAWGNINLFDYTDTLVSGKMALNLWPVPHGLEDLLNPIG

SEQ ID NO: 7882 - protein, 40 aa, Artificial Sequence
  Description of Artificial Sequence: Synthetic polypeptide
YTDTLVSGKMALNLWPVPHGLEDLLNPIGVTGSNPNKETP

SEQ ID NO: 7883 - protein, 40 aa, Artificial Sequence
  Description of Artificial Sequence: Synthetic polypeptide
DTLVSGKMALNLWPVPHGLEDLLNPIGVTGSNPNKETPCL

SEQ ID NO: 7884 - protein, 40 aa, Artificial Sequence
  Description of Artificial Sequence: Synthetic polypeptide
TLVSGKMALNLWPVPHGLEDLLNPIGVTGSNPNKETPCLE

SEQ ID NO: 7885 - protein, 40 aa, Artificial Sequence
  Description of Artificial Sequence: Synthetic polypeptide
LVSGKMALNLWPVPHGLEDLLNPIGVTGSNPNKETPCLEL

SEQ ID NO: 7886 - protein, 40 aa, Artificial Sequence
  Description of Artificial Sequence: Synthetic polypeptide
VSGKMALNLWPVPHGLEDLLNPIGVTGSNPNKETPCLELE

SEQ ID NO: 7887 - protein, 40 aa, Artificial Sequence
  Description of Artificial Sequence: Synthetic polypeptide
SGKMALNLWPVPHGLEDLLNPIGVTGSNPNKETPCLELEF

SEQ ID NO: 7888 - protein, 40 aa, Artificial Sequence
  Description of Artificial Sequence: Synthetic polypeptide
GKMALNLWPVPHGLEDLLNPIGVTGSNPNKETPCLELEFD

SEQ ID NO: 7889 - protein, 40 aa, Artificial Sequence
  Description of Artificial Sequence: Synthetic polypeptide
KMALNLWPVPHGLEDLLNPIGVTGSNPNKETPCLELEFDW

SEQ ID NO: 7890 - protein, 40 aa, Artificial Sequence
  Description of Artificial Sequence: Synthetic polypeptide
MALNLWPVPHGLEDLLNPIGVTGSNPNKETPCLELEFDWF

SEQ ID NO: 7891 - protein, 40 aa, Artificial Sequence
  Description of Artificial Sequence: Synthetic polypeptide
ALNLWPVPHGLEDLLNPIGVTGSNPNKETPCLELEFDWFS

SEQ ID NO: 7892 - protein, 40 aa, Artificial Sequence
  Description of Artificial Sequence: Synthetic polypeptide
MNLWPVPHGLEDLLNPIGVTGSNPNKETPCLELEFDWFSS

SEQ ID NO: 7893 - protein, 40 aa, Artificial Sequence
  Description of Artificial Sequence: Synthetic polypeptide
NLWPVPHGLEDLLNPIGVTGSNPNKETPCLELEFDWFSSV

SEQ ID NO: 7894 - protein, 40 aa, Artificial Sequence
  Description of Artificial Sequence: Synthetic polypeptide
LWPVPHGLEDLLNPIGVTGSNPNKETPCLELEFDWFSSVV

SEQ ID NO: 7895 - protein, 40 aa, Artificial Sequence
  Description of Artificial Sequence: Synthetic polypeptide
WPVPHGLEDLLNPIGVTGSNPNKETPCLELEFDWFSSVVK

SEQ ID NO: 7896 - protein, 40 aa, Artificial Sequence
  Description of Artificial Sequence: Synthetic polypeptide
PVPHGLEDLLNPIGVTGSNPNKETPCLELEFDWFSSVVKF

SEQ ID NO: 7897 - protein, 40 aa, Artificial Sequence
  Description of Artificial Sequence: Synthetic polypeptide
VPHGLEDLLNPIGVTGSNPNKETPCLELEFDWFSSVVKFP

SEQ ID NO: 7898 - protein, 40 aa, Artificial Sequence
  Description of Artificial Sequence: Synthetic polypeptide
PHGLEDLLNPIGVTGSNPNKETPCLELEFDWFSSVVKFPD

SEQ ID NO: 7899 - protein, 40 aa, Artificial Sequence
  Description of Artificial Sequence: Synthetic polypeptide
HGLEDLLNPIGVTGSNPNKETPCLELEFDWFSSVVKFPDM

SEQ ID NO: 7900 - protein, 40 aa, Artificial Sequence
  Description of Artificial Sequence: Synthetic polypeptide
GLEDLLNPIGVTGSNPNKETPCLELEFDWFSSVVKFPDMS

SEQ ID NO: 7901 - protein, 40 aa, Artificial Sequence
  Description of Artificial Sequence: Synthetic polypeptide
LEDLLNPIGVTGSNPNKETPCLELEFDWFSSVVKFPDMSV

SEQ ID NO: 7902 - protein, 40 aa, Artificial Sequence
  Description of Artificial Sequence: Synthetic polypeptide
MNPIGVTGSNPNKETPCLELEFDWFSSVVKFPDMSVIEEH

SEQ ID NO: 7903 - protein, 40 aa, Artificial Sequence
  Description of Artificial Sequence: Synthetic polypeptide
PIGVTGSNPNKETPCLELEFDWFSSVVKFPDMSVIEEHAN

SEQ ID NO: 7904 - protein, 40 aa, Artificial Sequence
  Description of Artificial Sequence: Synthetic polypeptide
TGSNPNKETPCLELEFDWFSSVVKFPDMSVIEEHANWSVS

SEQ ID NO: 7905 - protein, 40 aa, Artificial Sequence
  Description of Artificial Sequence: Synthetic polypeptide
GSNPNKETPCLELEFDWFSSVVKFPDMSVIEEHANWSVSR

SEQ ID NO: 7906 - protein, 40 aa, Artificial Sequence
  Description of Artificial Sequence: Synthetic polypeptide
TPCLELEFDWFSSVVKFPDMSVIEEHANWSVSREAGFSYS

SEQ ID NO: 7907 - protein, 40 aa, Artificial Sequence
  Description of Artificial Sequence: Synthetic polypeptide
KFPDMSVIEEHANWSVSREAGFSYSHAGLSNRLARDNELR

SEQ ID NO: 7908 - protein, 40 aa, Artificial Sequence
  Description of Artificial Sequence: Synthetic polypeptide
ITEQEKDFLWSHRHYCVTIPEILPKLLLSVKWNSRDEVAQ

SEQ ID NO: 7909 - protein, 40 aa, Artificial Sequence
  Description of Artificial Sequence: Synthetic polypeptide
KDFLWSHRHYCVTIPEILPKLLLSVKWNSRDEVAQMYCLV

SEQ ID NO: 7910 - protein, 40 aa, Artificial Sequence
  Description of Artificial Sequence: Synthetic polypeptide
TIPEILPKLLLSVKWNSRDEVAQMYCLVKDWPPIKPEQAM

SEQ ID NO: 7911 - protein, 40 aa, Artificial Sequence
  Description of Artificial Sequence: Synthetic polypeptide
IPEILPKLLLSVKWNSRDEVAQMYCLVKDWPPIKPEQAME

SEQ ID NO: 7912 - protein, 40 aa, Artificial Sequence
  Description of Artificial Sequence: Synthetic polypeptide
PKLLLSVKWNSRDEVAQMYCLVKDWPPIKPEQAMELLDCN

SEQ ID NO: 7913 - protein, 40 aa, Artificial Sequence
  Description of Artificial Sequence: Synthetic polypeptide
WNSRDEVAQMYCLVKDWPPIKPEQAMELLDCNYPDPMVRG

SEQ ID NO: 7914 - protein, 40 aa, Artificial Sequence
  Description of Artificial Sequence: Synthetic polypeptide
MVKDWPPIKPEQAMELLDCNYPDPMVRGFAVRCLEKYLTD

SEQ ID NO: 7915 - protein, 40 aa, Artificial Sequence
  Description of Artificial Sequence: Synthetic polypeptide
QAMELLDCNYPDPMVRGFAVRCLEKYLTDDKLSQYLIQLV

SEQ ID NO: 7916 - protein, 40 aa, Artificial Sequence
  Description of Artificial Sequence: Synthetic polypeptide
CNYPDPMVRGFAVRCLEKYLTDDKLSQYLIQLVQVLKYEQ

SEQ ID NO: 7917 - protein, 40 aa, Artificial Sequence
  Description of Artificial Sequence: Synthetic polypeptide
PDPMVRGFAVRCLEKYLTDDKLSQYLIQLVQVLKYEQYLD

SEQ ID NO: 7918 - protein, 40 aa, Artificial Sequence
  Description of Artificial Sequence: Synthetic polypeptide
DPMVRGFAVRCLEKYLTDDKLSQYLIQLVQVLKYEQYLDN

SEQ ID NO: 7919 - protein, 40 aa, Artificial Sequence
  Description of Artificial Sequence: Synthetic polypeptide
MVRGFAVRCLEKYLTDDKLSQYLIQLVQVLKYEQYLDNLL

SEQ ID NO: 7920 - protein, 40 aa, Artificial Sequence
  Description of Artificial Sequence: Synthetic polypeptide
GFAVRCLEKYLTDDKLSQYLIQLVQVLKYEQYLDNLLVRF

SEQ ID NO: 7921 - protein, 40 aa, Artificial Sequence
  Description of Artificial Sequence: Synthetic polypeptide
AVRCLEKYLTDDKLSQYLIQLVQVLKYEQYLDNLLVRFLL

SEQ ID NO: 7922 - protein, 40 aa, Artificial Sequence
  Description of Artificial Sequence: Synthetic polypeptide
VRCLEKYLTDDKLSQYLIQLVQVLKYEQYLDNLLVRFLLK

SEQ ID NO: 7923 - protein, 40 aa, Artificial Sequence
  Description of Artificial Sequence: Synthetic polypeptide
RCLEKYLTDDKLSQYLIQLVQVLKYEQYLDNLLVRFLLKK

SEQ ID NO: 7924 - protein, 40 aa, Artificial Sequence
  Description of Artificial Sequence: Synthetic polypeptide
CLEKYLTDDKLSQYLIQLVQVLKYEQYLDNLLVRFLLKKA

SEQ ID NO: 7925 - protein, 40 aa, Artificial Sequence
  Description of Artificial Sequence: Synthetic polypeptide
MEKYLTDDKLSQYLIQLVQVLKYEQYLDNLLVRFLLKKAL

SEQ ID NO: 7926 - protein, 40 aa, Artificial Sequence
  Description of Artificial Sequence: Synthetic polypeptide
EKYLTDDKLSQYLIQLVQVLKYEQYLDNLLVRFLLKKALT

SEQ ID NO: 7927 - protein, 40 aa, Artificial Sequence
  Description of Artificial Sequence: Synthetic polypeptide
KYLTDDKLSQYLIQLVQVLKYEQYLDNLLVRFLLKKALTN

SEQ ID NO: 7928 - protein, 40 aa, Artificial Sequence
  Description of Artificial Sequence: Synthetic polypeptide
YLTDDKLSQYLIQLVQVLKYEQYLDNLLVRFLLKKALTNQ

SEQ ID NO: 7929 - protein, 40 aa, Artificial Sequence
  Description of Artificial Sequence: Synthetic polypeptide
DDKLSQYLIQLVQVLKYEQYLDNLLVRFLLKKALTNQRIG

SEQ ID NO: 7930 - protein, 40 aa, Artificial Sequence
  Description of Artificial Sequence: Synthetic polypeptide
DKLSQYLIQLVQVLKYEQYLDNLLVRFLLKKALTNQRIGH

SEQ ID NO: 7931 - protein, 40 aa, Artificial Sequence
  Description of Artificial Sequence: Synthetic polypeptide
KLSQYLIQLVQVLKYEQYLDNLLVRFLLKKALTNQRIGHF

SEQ ID NO: 7932 - protein, 40 aa, Artificial Sequence
  Description of Artificial Sequence: Synthetic polypeptide
LSQYLIQLVQVLKYEQYLDNLLVRFLLKKALTNQRIGHFF

SEQ ID NO: 7933 - protein, 40 aa, Artificial Sequence
  Description of Artificial Sequence: Synthetic polypeptide
SQYLIQLVQVLKYEQYLDNLLVRFLLKKALTNQRIGHFFF

SEQ ID NO: 7934 - protein, 40 aa, Artificial Sequence
  Description of Artificial Sequence: Synthetic polypeptide
QYLIQLVQVLKYEQYLDNLLVRFLLKKALTNQRIGHFFFW

SEQ ID NO: 7935 - protein, 40 aa, Artificial Sequence
  Description of Artificial Sequence: Synthetic polypeptide
YLIQLVQVLKYEQYLDNLLVRFLLKKALTNQRIGHFFFWH

SEQ ID NO: 7936 - protein, 40 aa, Artificial Sequence
  Description of Artificial Sequence: Synthetic polypeptide
IQLVQVLKYEQYLDNLLVRFLLKKALTNQRIGHFFFWHLK

SEQ ID NO: 7937 - protein, 40 aa, Artificial Sequence
  Description of Artificial Sequence: Synthetic polypeptide
QLVQVLKYEQYLDNLLVRFLLKKALTNQRIGHFFFWHLKS

SEQ ID NO: 7938 - protein, 40 aa, Artificial Sequence
  Description of Artificial Sequence: Synthetic polypeptide
LVQVLKYEQYLDNLLVRFLLKKALTNQRIGHFFFWHLKSE

SEQ ID NO: 7939 - protein, 40 aa, Artificial Sequence
  Description of Artificial Sequence: Synthetic polypeptide
VQVLKYEQYLDNLLVRFLLKKALTNQRIGHFFFWHLKSEM

SEQ ID NO: 7940 - protein, 40 aa, Artificial Sequence
  Description of Artificial Sequence: Synthetic polypeptide
QVLKYEQYLDNLLVRFLLKKALTNQRIGHFFFWHLKSEMH

SEQ ID NO: 7941 - protein, 40 aa, Artificial Sequence
  Description of Artificial Sequence: Synthetic polypeptide
KYEQYLDNLLVRFLLKKALTNQRIGHFFFWHLKSEMHNKT

SEQ ID NO: 7942 - protein, 40 aa, Artificial Sequence
  Description of Artificial Sequence: Synthetic polypeptide
QYLDNLLVRFLLKKALTNQRIGHFFFWHLKSEMHNKTVSQ

SEQ ID NO: 7943 - protein, 40 aa, Artificial Sequence
  Description of Artificial Sequence: Synthetic polypeptide
MLVRFLLKKALTNQRIGHFFFWHLKSEMHNKTVSQRFGLL

SEQ ID NO: 7944 - protein, 40 aa, Artificial Sequence
  Description of Artificial Sequence: Synthetic polypeptide
RFLLKKALTNQRIGHFFFWHLKSEMHNKTVSQRFGLLLES

SEQ ID NO: 7945 - protein, 40 aa, Artificial Sequence
  Description of Artificial Sequence: Synthetic polypeptide
QRIGHFFFWHLKSEMHNKTVSQRFGLLLESYCRACGMYLK

SEQ ID NO: 7946 - protein, 40 aa, Artificial Sequence
  Description of Artificial Sequence: Synthetic polypeptide
RIGHFFFWHLKSEMHNKTVSQRFGLLLESYCRACGMYLKH

SEQ ID NO: 7947 - protein, 40 aa, Artificial Sequence
  Description of Artificial Sequence: Synthetic polypeptide
IGHFFFWHLKSEMHNKTVSQRFGLLLESYCRACGMYLKHL

SEQ ID NO: 7948 - protein, 40 aa, Artificial Sequence
  Description of Artificial Sequence: Synthetic polypeptide
HFFFWHLKSEMHNKTVSQRFGLLLESYCRACGMYLKHLNR

SEQ ID NO: 7949 - protein, 40 aa, Artificial Sequence
  Description of Artificial Sequence: Synthetic polypeptide
FFFWHLKSEMHNKTVSQRFGLLLESYCRACGMYLKHLNRQ

SEQ ID NO: 7950 - protein, 40 aa, Artificial Sequence
  Description of Artificial Sequence: Synthetic polypeptide
WHLKSEMHNKTVSQRFGLLLESYCRACGMYLKHLNRQVEA

SEQ ID NO: 7951 - protein, 40 aa, Artificial Sequence
  Description of Artificial Sequence: Synthetic polypeptide
HLKSEMHNKTVSQRFGLLLESYCRACGMYLKHLNRQVEAM

SEQ ID NO: 7952 - protein, 40 aa, Artificial Sequence
  Description of Artificial Sequence: Synthetic polypeptide
SEMHNKTVSQRFGLLLESYCRACGMYLKHLNRQVEAMEKL

SEQ ID NO: 7953 - protein, 40 aa, Artificial Sequence
  Description of Artificial Sequence: Synthetic polypeptide
NKTVSQRFGLLLESYCRACGMYLKHLNRQVEAMEKLINLT

SEQ ID NO: 7954 - protein, 40 aa, Artificial Sequence
  Description of Artificial Sequence: Synthetic polypeptide
RFGLLLESYCRACGMYLKHLNRQVEAMEKLINLTDILKQE

SEQ ID NO: 7955 - protein, 40 aa, Artificial Sequence
  Description of Artificial Sequence: Synthetic polypeptide
YCRACGMYLKHLNRQVEAMEKLINLTDILKQEKKDETQKV

SEQ ID NO: 7956 - protein, 40 aa, Artificial Sequence
  Description of Artificial Sequence: Synthetic polypeptide
CRACGMYLKHLNRQVEAMEKLINLTDILKQEKKDETQKVQ

SEQ ID NO: 7957 - protein, 40 aa, Artificial Sequence
  Description of Artificial Sequence: Synthetic polypeptide
CGMYLKHLNRQVEAMEKLINLTDILKQEKKDETQKVQMKF

SEQ ID NO: 7958 - protein, 40 aa, Artificial Sequence
  Description of Artificial Sequence: Synthetic polypeptide
MYLKHLNRQVEAMEKLINLTDILKQEKKDETQKVQMKFLV

SEQ ID NO: 7959 - protein, 40 aa, Artificial Sequence
  Description of Artificial Sequence: Synthetic polypeptide
NRQVEAMEKLINLTDILKQEKKDETQKVQMKFLVEQMRRP

SEQ ID NO: 7960 - protein, 40 aa, Artificial Sequence
  Description of Artificial Sequence: Synthetic polypeptide
RQVEAMEKLINLTDILKQEKKDETQKVQMKFLVEQMRRPD

SEQ ID NO: 7961 - protein, 40 aa, Artificial Sequence
  Description of Artificial Sequence: Synthetic polypeptide
VEAMEKLINLTDILKQEKKDETQKVQMKFLVEQMRRPDFM

SEQ ID NO: 7962 - protein, 40 aa, Artificial Sequence
  Description of Artificial Sequence: Synthetic polypeptide
EAMEKLINLTDILKQEKKDETQKVQMKFLVEQMRRPDFMD

SEQ ID NO: 7963 - protein, 40 aa, Artificial Sequence
  Description of Artificial Sequence: Synthetic polypeptide
AMEKLINLTDILKQEKKDETQKVQMKFLVEQMRRPDFMDA

SEQ ID NO: 7964 - protein, 40 aa, Artificial Sequence
  Description of Artificial Sequence: Synthetic polypeptide
MEKLINLTDILKQEKKDETQKVQMKFLVEQMRRPDFMDAL

SEQ ID NO: 7965 - protein, 40 aa, Artificial Sequence
  Description of Artificial Sequence: Synthetic polypeptide
KLINLTDILKQEKKDETQKVQMKFLVEQMRRPDFMDALQG

SEQ ID NO: 7966 - protein, 40 aa, Artificial Sequence
  Description of Artificial Sequence: Synthetic polypeptide
NLTDILKQEKKDETQKVQMKFLVEQMRRPDFMDALQGFLS

SEQ ID NO: 7967 - protein, 40 aa, Artificial Sequence
  Description of Artificial Sequence: Synthetic polypeptide
DILKQEKKDETQKVQMKFLVEQMRRPDFMDALQGFLSPLN

SEQ ID NO: 7968 - protein, 40 aa, Artificial Sequence
  Description of Artificial Sequence: Synthetic polypeptide
LKQEKKDETQKVQMKFLVEQMRRPDFMDALQGFLSPLNPA

SEQ ID NO: 7969 - protein, 40 aa, Artificial Sequence
  Description of Artificial Sequence: Synthetic polypeptide
QEKKDETQKVQMKFLVEQMRRPDFMDALQGFLSPLNPAHQ

SEQ ID NO: 7970 - protein, 40 aa, Artificial Sequence
  Description of Artificial Sequence: Synthetic polypeptide
KDETQKVQMKFLVEQMRRPDFMDALQGFLSPLNPAHQLGN

SEQ ID NO: 7971 - protein, 40 aa, Artificial Sequence
  Description of Artificial Sequence: Synthetic polypeptide
DETQKVQMKFLVEQMRRPDFMDALQGFLSPLNPAHQLGNL

SEQ ID NO: 7972 - protein, 40 aa, Artificial Sequence
  Description of Artificial Sequence: Synthetic polypeptide
ETQKVQMKFLVEQMRRPDFMDALQGFLSPLNPAHQLGNLR

SEQ ID NO: 7973 - protein, 40 aa, Artificial Sequence
  Description of Artificial Sequence: Synthetic polypeptide
TQKVQMKFLVEQMRRPDFMDALQGFLSPLNPAHQLGNLRL

SEQ ID NO: 7974 - protein, 40 aa, Artificial Sequence
  Description of Artificial Sequence: Synthetic polypeptide
VQMKFLVEQMRRPDFMDALQGFLSPLNPAHQLGNLRLEEC

SEQ ID NO: 7975 - protein, 40 aa, Artificial Sequence
  Description of Artificial Sequence: Synthetic polypeptide
MKFLVEQMRRPDFMDALQGFLSPLNPAHQLGNLRLEECRI

SEQ ID NO: 7976 - protein, 40 aa, Artificial Sequence
  Description of Artificial Sequence: Synthetic polypeptide
KFLVEQMRRPDFMDALQGFLSPLNPAHQLGNLRLEECRIM

SEQ ID NO: 7977 - protein, 40 aa, Artificial Sequence
  Description of Artificial Sequence: Synthetic polypeptide
VEQMRRPDFMDALQGFLSPLNPAHQLGNLRLEECRIMSSA

SEQ ID NO: 7978 - protein, 40 aa, Artificial Sequence
  Description of Artificial Sequence: Synthetic polypeptide
MRRPDFMDALQGFLSPLNPAHQLGNLRLEECRIMSSAKRP

SEQ ID NO: 7979 - protein, 40 aa, Artificial Sequence
  Description of Artificial Sequence: Synthetic polypeptide
RRPDFMDALQGFLSPLNPAHQLGNLRLEECRIMSSAKRPL

SEQ ID NO: 7980 - protein, 40 aa, Artificial Sequence
  Description of Artificial Sequence: Synthetic polypeptide
PDFMDALQGFLSPLNPAHQLGNLRLEECRIMSSAKRPLWL

SEQ ID NO: 7981 - protein, 40 aa, Artificial Sequence
  Description of Artificial Sequence: Synthetic polypeptide
ALQGFLSPLNPAHQLGNLRLEECRIMSSAKRPLWLNWENP

SEQ ID NO: 7982 - protein, 40 aa, Artificial Sequence
  Description of Artificial Sequence: Synthetic polypeptide
LQGFLSPLNPAHQLGNLRLEECRIMSSAKRPLWLNWENPD

SEQ ID NO: 7983 - protein, 40 aa, Artificial Sequence
  Description of Artificial Sequence: Synthetic polypeptide
LNPAHQLGNLRLEECRIMSSAKRPLWLNWENPDIMSELLF

SEQ ID NO: 7984 - protein, 40 aa, Artificial Sequence
  Description of Artificial Sequence: Synthetic polypeptide
GNLRLEECRIMSSAKRPLWLNWENPDIMSELLFQNNEIIF

SEQ ID NO: 7985 - protein, 40 aa, Artificial Sequence
  Description of Artificial Sequence: Synthetic polypeptide
RLEECRIMSSAKRPLWLNWENPDIMSELLFQNNEIIFKNG

SEQ ID NO: 7986 - protein, 40 aa, Artificial Sequence
  Description of Artificial Sequence: Synthetic polypeptide
IFKNGDDLRQDMLTLQIIRIMENIWQNQGLDLRMLPYGCL

SEQ ID NO: 7987 - protein, 40 aa, Artificial Sequence
  Description of Artificial Sequence: Synthetic polypeptide
KNGDDLRQDMLTLQIIRIMENIWQNQGLDLRMLPYGCLSI

SEQ ID NO: 7988 - protein, 40 aa, Artificial Sequence
  Description of Artificial Sequence: Synthetic polypeptide
LQIIRIMENIWQNQGLDLRMLPYGCLSIGDCVGLIEVVRN

SEQ ID NO: 7989 - protein, 40 aa, Artificial Sequence
  Description of Artificial Sequence: Synthetic polypeptide
QIIRIMENIWQNQGLDLRMLPYGCLSIGDCVGLIEVVRNS

SEQ ID NO: 7990 - protein, 40 aa, Artificial Sequence
  Description of Artificial Sequence: Synthetic polypeptide
IMENIWQNQGLDLRMLPYGCLSIGDCVGLIEVVRNSHTIM

SEQ ID NO: 7991 - protein, 40 aa, Artificial Sequence
  Description of Artificial Sequence: Synthetic polypeptide
IWQNQGLDLRMLPYGCLSIGDCVGLIEVVRNSHTIMQIQC

SEQ ID NO: 7992 - protein, 40 aa, Artificial Sequence
  Description of Artificial Sequence: Synthetic polypeptide
WQNQGLDLRMLPYGCLSIGDCVGLIEVVRNSHTIMQIQCK

SEQ ID NO: 7993 - protein, 40 aa, Artificial Sequence
  Description of Artificial Sequence: Synthetic polypeptide
QGLDLRMLPYGCLSIGDCVGLIEVVRNSHTIMQIQCKGGL

SEQ ID NO: 7994 - protein, 40 aa, Artificial Sequence
  Description of Artificial Sequence: Synthetic polypeptide
RMLPYGCLSIGDCVGLIEVVRNSHTIMQIQCKGGLKGALQ

SEQ ID NO: 7995 - protein, 40 aa, Artificial Sequence
  Description of Artificial Sequence: Synthetic polypeptide
AIDLFTRSCAGYCVATFILGIGDRHNSNIMVKDDGQLFHI

SEQ ID NO: 7996 - protein, 40 aa, Artificial Sequence
  Description of Artificial Sequence: Synthetic polypeptide
TRSCAGYCVATFILGIGDRHNSNIMVKDDGQLFHIDFGHF

SEQ ID NO: 7997 - protein, 40 aa, Artificial Sequence
  Description of Artificial Sequence: Synthetic polypeptide
TFILGIGDRHNSNIMVKDDGQLFHIDFGHFLDHKKKKFGY

SEQ ID NO: 7998 - protein, 40 aa, Artificial Sequence
  Description of Artificial Sequence: Synthetic polypeptide
GIGDRHNSNIMVKDDGQLFHIDFGHFLDHKKKKFGYKRER

SEQ ID NO: 7999 - protein, 40 aa, Artificial Sequence
  Description of Artificial Sequence: Synthetic polypeptide
IGDRHNSNIMVKDDGQLFHIDFGHFLDHKKKKFGYKRERV

SEQ ID NO: 8000 - protein, 40 aa, Artificial Sequence
  Description of Artificial Sequence: Synthetic polypeptide
HNSNIMVKDDGQLFHIDFGHFLDHKKKKFGYKRERVPFVL

SEQ ID NO: 8001 - protein, 40 aa, Artificial Sequence
  Description of Artificial Sequence: Synthetic polypeptide
MVKDDGQLFHIDFGHFLDHKKKKFGYKRERVPFVLTQDFL

SEQ ID NO: 8002 - protein, 40 aa, Artificial Sequence
  Description of Artificial Sequence: Synthetic polypeptide
DDGQLFHIDFGHFLDHKKKKFGYKRERVPFVLTQDFLIVI

SEQ ID NO: 8003 - protein, 40 aa, Artificial Sequence
  Description of Artificial Sequence: Synthetic polypeptide
DGQLFHIDFGHFLDHKKKKFGYKRERVPFVLTQDFLIVIS

SEQ ID NO: 8004 - protein, 40 aa, Artificial Sequence
  Description of Artificial Sequence: Synthetic polypeptide
GQLFHIDFGHFLDHKKKKFGYKRERVPFVLTQDFLIVISK

SEQ ID NO: 8005 - protein, 40 aa, Artificial Sequence
  Description of Artificial Sequence: Synthetic polypeptide
FHIDFGHFLDHKKKKFGYKRERVPFVLTQDFLIVISKGAQ

SEQ ID NO: 8006 - protein, 40 aa, Artificial Sequence
  Description of Artificial Sequence: Synthetic polypeptide
FGHFLDHKKKKFGYKRERVPFVLTQDFLIVISKGAQECTK

SEQ ID NO: 8007 - protein, 40 aa, Artificial Sequence
  Description of Artificial Sequence: Synthetic polypeptide
HFLDHKKKKFGYKRERVPFVLTQDFLIVISKGAQECTKTR

SEQ ID NO: 8008 - protein, 40 aa, Artificial Sequence
  Description of Artificial Sequence: Synthetic polypeptide
FLDHKKKKFGYKRERVPFVLTQDFLIVISKGAQECTKTRE

SEQ ID NO: 8009 - protein, 40 aa, Artificial Sequence
  Description of Artificial Sequence: Synthetic polypeptide
MDHKKKKFGYKRERVPFVLTQDFLIVISKGAQECTKTREF

SEQ ID NO: 8010 - protein, 40 aa, Artificial Sequence
  Description of Artificial Sequence: Synthetic polypeptide
HKKKKFGYKRERVPFVLTQDFLIVISKGAQECTKTREFER

SEQ ID NO: 8011 - protein, 40 aa, Artificial Sequence
  Description of Artificial Sequence: Synthetic polypeptide
KFGYKRERVPFVLTQDFLIVISKGAQECTKTREFERFQEM

SEQ ID NO: 8012 - protein, 40 aa, Artificial Sequence
  Description of Artificial Sequence: Synthetic polypeptide
FGYKRERVPFVLTQDFLIVISKGAQECTKTREFERFQEMC

SEQ ID NO: 8013 - protein, 40 aa, Artificial Sequence
  Description of Artificial Sequence: Synthetic polypeptide
YKRERVPFVLTQDFLIVISKGAQECTKTREFERFQEMCYK

SEQ ID NO: 8014 - protein, 40 aa, Artificial Sequence
  Description of Artificial Sequence: Synthetic polypeptide
KRERVPFVLTQDFLIVISKGAQECTKTREFERFQEMCYKA

SEQ ID NO: 8015 - protein, 40 aa, Artificial Sequence
  Description of Artificial Sequence: Synthetic polypeptide
RERVPFVLTQDFLIVISKGAQECTKTREFERFQEMCYKAY

SEQ ID NO: 8016 - protein, 40 aa, Artificial Sequence
  Description of Artificial Sequence: Synthetic polypeptide
RVPFVLTQDFLIVISKGAQECTKTREFERFQEMCYKAYLA

SEQ ID NO: 8017 - protein, 40 aa, Artificial Sequence
  Description of Artificial Sequence: Synthetic polypeptide
FVLTQDFLIVISKGAQECTKTREFERFQEMCYKAYLAIRQ

SEQ ID NO: 8018 - protein, 40 aa, Artificial Sequence
  Description of Artificial Sequence: Synthetic polypeptide
TQDFLIVISKGAQECTKTREFERFQEMCYKAYLAIRQHAN

SEQ ID NO: 8019 - protein, 40 aa, Artificial Sequence
  Description of Artificial Sequence: Synthetic polypeptide
DFLIVISKGAQECTKTREFERFQEMCYKAYLAIRQHANLF

SEQ ID NO: 8020 - protein, 40 aa, Artificial Sequence
  Description of Artificial Sequence: Synthetic polypeptide
VISKGAQECTKTREFERFQEMCYKAYLAIRQHANLFINLF

SEQ ID NO: 8021 - protein, 40 aa, Artificial Sequence
  Description of Artificial Sequence: Synthetic polypeptide
ISKGAQECTKTREFERFQEMCYKAYLAIRQHANLFINLFS

SEQ ID NO: 8022 - protein, 40 aa, Artificial Sequence
  Description of Artificial Sequence: Synthetic polypeptide
TREFERFQEMCYKAYLAIRQHANLFINLFSMMLGSGMPEL

SEQ ID NO: 8023 - protein, 40 aa, Artificial Sequence
  Description of Artificial Sequence: Synthetic polypeptide
REFERFQEMCYKAYLAIRQHANLFINLFSMMLGSGMPELQ

SEQ ID NO: 8024 - protein, 40 aa, Artificial Sequence
  Description of Artificial Sequence: Synthetic polypeptide
CYKAYLAIRQHANLFINLFSMMLGSGMPELQSFDDIAYIR

SEQ ID NO: 8025 - protein, 40 aa, Artificial Sequence
  Description of Artificial Sequence: Synthetic polypeptide
RQHANLFINLFSMMLGSGMPELQSFDDIAYIRKTLALDKT

SEQ ID NO: 8026 - protein, 40 aa, Artificial Sequence
  Description of Artificial Sequence: Synthetic polypeptide
NLFINLFSMMLGSGMPELQSFDDIAYIRKTLALDKTEQEA

SEQ ID NO: 8027 - protein, 40 aa, Artificial Sequence
  Description of Artificial Sequence: Synthetic polypeptide
LFINLFSMMLGSGMPELQSFDDIAYIRKTLALDKTEQEAL

SEQ ID NO: 8028 - protein, 40 aa, Artificial Sequence
  Description of Artificial Sequence: Synthetic polypeptide
FINLFSMMLGSGMPELQSFDDIAYIRKTLALDKTEQEALE

SEQ ID NO: 8029 - protein, 40 aa, Artificial Sequence
  Description of Artificial Sequence: Synthetic polypeptide
NLFSMMLGSGMPELQSFDDIAYIRKTLALDKTEQEALEYF

SEQ ID NO: 8030 - protein, 40 aa, Artificial Sequence
  Description of Artificial Sequence: Synthetic polypeptide
LFSMMLGSGMPELQSFDDIAYIRKTLALDKTEQEALEYFM

SEQ ID NO: 8031 - protein, 40 aa, Artificial Sequence
  Description of Artificial Sequence: Synthetic polypeptide
SMMLGSGMPELQSFDDIAYIRKTLALDKTEQEALEYFMKQ

SEQ ID NO: 8032 - protein, 40 aa, Artificial Sequence
  Description of Artificial Sequence: Synthetic polypeptide
ELQSFDDIAYIRKTLALDKTEQEALEYFMKQMNDAHHGGW

SEQ ID NO: 8033 - protein, 40 aa, Artificial Sequence
  Description of Artificial Sequence: Synthetic polypeptide
DDIAYIRKTLALDKTEQEALEYFMKQMNDAHHGGWTTKMD

SEQ ID NO: 8034 - protein, 40 aa, Artificial Sequence
  Description of Artificial Sequence: Synthetic polypeptide
RKTLALDKTEQEALEYFMKQMNDAHHGGWTTKMDWIFHTI

SEQ ID NO: 8035 - protein, 40 aa, Artificial Sequence
  Description of Artificial Sequence: Synthetic polypeptide
LALDKTEQEALEYFMKQMNDAHHGGWTTKMDWIFHTIKQH

SEQ ID NO: 8036 - protein, 40 aa, Artificial Sequence
  Description of Artificial Sequence: Synthetic polypeptide
AEGYQYRALYDYKKEREEDIDLHLGDILTVNKGSLVALGF

SEQ ID NO: 8037 - protein, 40 aa, Artificial Sequence
  Description of Artificial Sequence: Synthetic polypeptide
RALYDYKKEREEDIDLHLGDILTVNKGSLVALGFSDGQEA

SEQ ID NO: 8038 - protein, 40 aa, Artificial Sequence
  Description of Artificial Sequence: Synthetic polypeptide
ALYDYKKEREEDIDLHLGDILTVNKGSLVALGFSDGQEAR

SEQ ID NO: 8039 - protein, 40 aa, Artificial Sequence
  Description of Artificial Sequence: Synthetic polypeptide
DIDLHLGDILTVNKGSLVALGFSDGQEARPEEIGWLNGYN

SEQ ID NO: 8040 - protein, 40 aa, Artificial Sequence
  Description of Artificial Sequence: Synthetic polypeptide
GSLVALGFSDGQEARPEEIGWLNGYNETTGERGDFPGTYV

SEQ ID NO: 8041 - protein, 40 aa, Artificial Sequence
  Description of Artificial Sequence: Synthetic polypeptide
EIGWLNGYNETTGERGDFPGTYVEYIGRKKISPPTPKPRP

SEQ ID NO: 8042 - protein, 40 aa, Artificial Sequence
  Description of Artificial Sequence: Synthetic polypeptide
GWLNGYNETTGERGDFPGTYVEYIGRKKISPPTPKPRPPR

SEQ ID NO: 8043 - protein, 40 aa, Artificial Sequence
  Description of Artificial Sequence: Synthetic polypeptide
WLNGYNETTGERGDFPGTYVEYIGRKKISPPTPKPRPPRP

SEQ ID NO: 8044 - protein, 40 aa, Artificial Sequence
  Description of Artificial Sequence: Synthetic polypeptide
LNGYNETTGERGDFPGTYVEYIGRKKISPPTPKPRPPRPL

SEQ ID NO: 8045 - protein, 40 aa, Artificial Sequence
  Description of Artificial Sequence: Synthetic polypeptide
NGYNETTGERGDFPGTYVEYIGRKKISPPTPKPRPPRPLP

SEQ ID NO: 8046 - protein, 40 aa, Artificial Sequence
  Description of Artificial Sequence: Synthetic polypeptide
GYNETTGERGDFPGTYVEYIGRKKISPPTPKPRPPRPLPV

SEQ ID NO: 8047 - protein, 40 aa, Artificial Sequence
  Description of Artificial Sequence: Synthetic polypeptide
YNETTGERGDFPGTYVEYIGRKKISPPTPKPRPPRPLPVA

SEQ ID NO: 8048 - protein, 40 aa, Artificial Sequence
  Description of Artificial Sequence: Synthetic polypeptide
RGDFPGTYVEYIGRKKISPPTPKPRPPRPLPVAPGSSKTE

SEQ ID NO: 8049 - protein, 40 aa, Artificial Sequence
  Description of Artificial Sequence: Synthetic polypeptide
AEQFAPPDIAPPLLIKLVEAIEKKGLECSTLYRTQSSSNL

SEQ ID NO: 8050 - protein, 40 aa, Artificial Sequence
  Description of Artificial Sequence: Synthetic polypeptide
EQFAPPDIAPPLLIKLVEAIEKKGLECSTLYRTQSSSNLA

SEQ ID NO: 8051 - protein, 40 aa, Artificial Sequence
  Description of Artificial Sequence: Synthetic polypeptide
APPDIAPPLLIKLVEAIEKKGLECSTLYRTQSSSNLAELR

SEQ ID NO: 8052 - protein, 40 aa, Artificial Sequence
  Description of Artificial Sequence: Synthetic polypeptide
SNLAELRQLLDCDTPSVDLEMIDVHVLADAFKRYLLDLPN

SEQ ID NO: 8053 - protein, 40 aa, Artificial Sequence
  Description of Artificial Sequence: Synthetic polypeptide
LLDCDTPSVDLEMIDVHVLADAFKRYLLDLPNPVIPAAVY

SEQ ID NO: 8054 - protein, 40 aa, Artificial Sequence
  Description of Artificial Sequence: Synthetic polypeptide
DAFKRYLLDLPNPVIPAAVYSEMISLAPEVQSSEEYIQLL

SEQ ID NO: 8055 - protein, 40 aa, Artificial Sequence
  Description of Artificial Sequence: Synthetic polypeptide
LLDLPNPVIPAAVYSEMISLAPEVQSSEEYIQLLKKLIRS

SEQ ID NO: 8056 - protein, 40 aa, Artificial Sequence
  Description of Artificial Sequence: Synthetic polypeptide
MDLPNPVIPAAVYSEMISLAPEVQSSEEYIQLLKKLIRSP

SEQ ID NO: 8057 - protein, 40 aa, Artificial Sequence
  Description of Artificial Sequence: Synthetic polypeptide
DLPNPVIPAAVYSEMISLAPEVQSSEEYIQLLKKLIRSPS

SEQ ID NO: 8058 - protein, 40 aa, Artificial Sequence
  Description of Artificial Sequence: Synthetic polypeptide
PNPVIPAAVYSEMISLAPEVQSSEEYIQLLKKLIRSPSIP

SEQ ID NO: 8059 - protein, 40 aa, Artificial Sequence
  Description of Artificial Sequence: Synthetic polypeptide
NPVIPAAVYSEMISLAPEVQSSEEYIQLLKKLIRSPSIPH

SEQ ID NO: 8060 - protein, 40 aa, Artificial Sequence
  Description of Artificial Sequence: Synthetic polypeptide
AVYSEMISLAPEVQSSEEYIQLLKKLIRSPSIPHQYWLTL

SEQ ID NO: 8061 - protein, 40 aa, Artificial Sequence
  Description of Artificial Sequence: Synthetic polypeptide
ISLAPEVQSSEEYIQLLKKLIRSPSIPHQYWLTLQYLLKH

SEQ ID NO: 8062 - protein, 40 aa, Artificial Sequence
  Description of Artificial Sequence: Synthetic polypeptide
SLAPEVQSSEEYIQLLKKLIRSPSIPHQYWLTLQYLLKHF

SEQ ID NO: 8063 - protein, 40 aa, Artificial Sequence
  Description of Artificial Sequence: Synthetic polypeptide
VQSSEEYIQLLKKLIRSPSIPHQYWLTLQYLLKHFFKLSQ

SEQ ID NO: 8064 - protein, 40 aa, Artificial Sequence
  Description of Artificial Sequence: Synthetic polypeptide
SSEEYIQLLKKLIRSPSIPHQYWLTLQYLLKHFFKLSQTS

SEQ ID NO: 8065 - protein, 40 aa, Artificial Sequence
  Description of Artificial Sequence: Synthetic polypeptide
LLKKLIRSPSIPHQYWLTLQYLLKHFFKLSQTSSKNLLNA

SEQ ID NO: 8066 - protein, 40 aa, Artificial Sequence
  Description of Artificial Sequence: Synthetic polypeptide
IRSPSIPHQYWLTLQYLLKHFFKLSQTSSKNLLNARVLSE

SEQ ID NO: 8067 - protein, 40 aa, Artificial Sequence
  Description of Artificial Sequence: Synthetic polypeptide
IPHQYWLTLQYLLKHFFKLSQTSSKNLLNARVLSEIFSPM

SEQ ID NO: 8068 - protein, 40 aa, Artificial Sequence
  Description of Artificial Sequence: Synthetic polypeptide
HQYWLTLQYLLKHFFKLSQTSSKNLLNARVLSEIFSPMLF

SEQ ID NO: 8069 - protein, 40 aa, Artificial Sequence
  Description of Artificial Sequence: Synthetic polypeptide
QYWLTLQYLLKHFFKLSQTSSKNLLNARVLSEIFSPMLFR

SEQ ID NO: 8070 - protein, 40 aa, Artificial Sequence
  Description of Artificial Sequence: Synthetic polypeptide
YWLTLQYLLKHFFKLSQTSSKNLLNARVLSEIFSPMLFRF

SEQ ID NO: 8071 - protein, 40 aa, Artificial Sequence
  Description of Artificial Sequence: Synthetic polypeptide
TLQYLLKHFFKLSQTSSKNLLNARVLSEIFSPMLFRFSAA

SEQ ID NO: 8072 - protein, 40 aa, Artificial Sequence
  Description of Artificial Sequence: Synthetic polypeptide
LQYLLKHFFKLSQTSSKNLLNARVLSEIFSPMLFRFSAAS

SEQ ID NO: 8073 - protein, 40 aa, Artificial Sequence
  Description of Artificial Sequence: Synthetic polypeptide
QYLLKHFFKLSQTSSKNLLNARVLSEIFSPMLFRFSAASS

SEQ ID NO: 8074 - protein, 40 aa, Artificial Sequence
  Description of Artificial Sequence: Synthetic polypeptide
YLLKHFFKLSQTSSKNLLNARVLSEIFSPMLFRFSAASSD

SEQ ID NO: 8075 - protein, 40 aa, Artificial Sequence
  Description of Artificial Sequence: Synthetic polypeptide
MLKHFFKLSQTSSKNLLNARVLSEIFSPMLFRFSAASSDN

SEQ ID NO: 8076 - protein, 40 aa, Artificial Sequence
  Description of Artificial Sequence: Synthetic polypeptide
HFFKLSQTSSKNLLNARVLSEIFSPMLFRFSAASSDNTEN

SEQ ID NO: 8077 - protein, 40 aa, Artificial Sequence
  Description of Artificial Sequence: Synthetic polypeptide
SQTSSKNLLNARVLSEIFSPMLFRFSAASSDNTENLIKVI

SEQ ID NO: 8078 - protein, 40 aa, Artificial Sequence
  Description of Artificial Sequence: Synthetic polypeptide
QTSSKNLLNARVLSEIFSPMLFRFSAASSDNTENLIKVIE

SEQ ID NO: 8079 - protein, 40 aa, Artificial Sequence
  Description of Artificial Sequence: Synthetic polypeptide
TSSKNLLNARVLSEIFSPMLFRFSAASSDNTENLIKVIEI

SEQ ID NO: 8080 - protein, 40 aa, Artificial Sequence
  Description of Artificial Sequence: Synthetic polypeptide
SSKNLLNARVLSEIFSPMLFRFSAASSDNTENLIKVIEIL

SEQ ID NO: 8081 - protein, 40 aa, Artificial Sequence
  Description of Artificial Sequence: Synthetic polypeptide
NLLNARVLSEIFSPMLFRFSAASSDNTENLIKVIEILIST

SEQ ID NO: 8082 - protein, 40 aa, Artificial Sequence
  Description of Artificial Sequence: Synthetic polypeptide
MLNARVLSEIFSPMLFRFSAASSDNTENLIKVIEILISTE

SEQ ID NO: 8083 - protein, 40 aa, Artificial Sequence
  Description of Artificial Sequence: Synthetic polypeptide
MNARVLSEIFSPMLFRFSAASSDNTENLIKVIEILISTEW

SEQ ID NO: 8084 - protein, 40 aa, Artificial Sequence
  Description of Artificial Sequence: Synthetic polypeptide
RVLSEIFSPMLFRFSAASSDNTENLIKVIEILISTEWNER

SEQ ID NO: 8085 - protein, 40 aa, Artificial Sequence
  Description of Artificial Sequence: Synthetic polypeptide
LSEIFSPMLFRFSAASSDNTENLIKVIEILISTEWNERQP

SEQ ID NO: 8086 - protein, 40 aa, Artificial Sequence
  Description of Artificial Sequence: Synthetic polypeptide
EIFSPMLFRFSAASSDNTENLIKVIEILISTEWNERQPAP

SEQ ID NO: 8087 - protein, 40 aa, Artificial Sequence
  Description of Artificial Sequence: Synthetic polypeptide
IFSPMLFRFSAASSDNTENLIKVIEILISTEWNERQPAPA

SEQ ID NO: 8088 - protein, 40 aa, Artificial Sequence
  Description of Artificial Sequence: Synthetic polypeptide
SPMLFRFSAASSDNTENLIKVIEILISTEWNERQPAPALP

SEQ ID NO: 8089 - protein, 40 aa, Artificial Sequence
  Description of Artificial Sequence: Synthetic polypeptide
LFRFSAASSDNTENLIKVIEILISTEWNERQPAPALPPKP

SEQ ID NO: 8090 - protein, 40 aa, Artificial Sequence
  Description of Artificial Sequence: Synthetic polypeptide
RFSAASSDNTENLIKVIEILISTEWNERQPAPALPPKPPK

SEQ ID NO: 8091 - protein, 40 aa, Artificial Sequence
  Description of Artificial Sequence: Synthetic polypeptide
AASSDNTENLIKVIEILISTEWNERQPAPALPPKPPKPTT

SEQ ID NO: 8092 - protein, 40 aa, Artificial Sequence
  Description of Artificial Sequence: Synthetic polypeptide
ASSDNTENLIKVIEILISTEWNERQPAPALPPKPPKPTTV

SEQ ID NO: 8093 - protein, 40 aa, Artificial Sequence
  Description of Artificial Sequence: Synthetic polypeptide
SSDNTENLIKVIEILISTEWNERQPAPALPPKPPKPTTVA

SEQ ID NO: 8094 - protein, 40 aa, Artificial Sequence
  Description of Artificial Sequence: Synthetic polypeptide
SDNTENLIKVIEILISTEWNERQPAPALPPKPPKPTTVAN

SEQ ID NO: 8095 - protein, 40 aa, Artificial Sequence
  Description of Artificial Sequence: Synthetic polypeptide
DNTENLIKVIEILISTEWNERQPAPALPPKPPKPTTVANN

SEQ ID NO: 8096 - protein, 40 aa, Artificial Sequence
  Description of Artificial Sequence: Synthetic polypeptide
PPKPPKPTTVANNGMNNNMSLQDAEWYWGDISREEVNEKL

SEQ ID NO: 8097 - protein, 40 aa, Artificial Sequence
  Description of Artificial Sequence: Synthetic polypeptide
DAEWYWGDISREEVNEKLRDTADGTFLVRDASTKMHGDYT

SEQ ID NO: 8098 - protein, 40 aa, Artificial Sequence
  Description of Artificial Sequence: Synthetic polypeptide
YWGDISREEVNEKLRDTADGTFLVRDASTKMHGDYTLTLR

SEQ ID NO: 8099 - protein, 40 aa, Artificial Sequence
  Description of Artificial Sequence: Synthetic polypeptide
EKLRDTADGTFLVRDASTKMHGDYTLTLRKGGNNKLIKIF

SEQ ID NO: 8100 - protein, 40 aa, Artificial Sequence
  Description of Artificial Sequence: Synthetic polypeptide
LRDTADGTFLVRDASTKMHGDYTLTLRKGGNNKLIKIFHR

SEQ ID NO: 8101 - protein, 40 aa, Artificial Sequence
  Description of Artificial Sequence: Synthetic polypeptide
DTADGTFLVRDASTKMHGDYTLTLRKGGNNKLIKIFHRDG

SEQ ID NO: 8102 - protein, 40 aa, Artificial Sequence
  Description of Artificial Sequence: Synthetic polypeptide
DGTFLVRDASTKMHGDYTLTLRKGGNNKLIKIFHRDGKYG

SEQ ID NO: 8103 - protein, 40 aa, Artificial Sequence
  Description of Artificial Sequence: Synthetic polypeptide
VRDASTKMHGDYTLTLRKGGNNKLIKIFHRDGKYGFSDPL

SEQ ID NO: 8104 - protein, 40 aa, Artificial Sequence
  Description of Artificial Sequence: Synthetic polypeptide
ASTKMHGDYTLTLRKGGNNKLIKIFHRDGKYGFSDPLTFS

SEQ ID NO: 8105 - protein, 40 aa, Artificial Sequence
  Description of Artificial Sequence: Synthetic polypeptide
MHGDYTLTLRKGGNNKLIKIFHRDGKYGFSDPLTFSSVVE

SEQ ID NO: 8106 - protein, 40 aa, Artificial Sequence
  Description of Artificial Sequence: Synthetic polypeptide
DYTLTLRKGGNNKLIKIFHRDGKYGFSDPLTFSSVVELIN

SEQ ID NO: 8107 - protein, 40 aa, Artificial Sequence
  Description of Artificial Sequence: Synthetic polypeptide
LTLRKGGNNKLIKIFHRDGKYGFSDPLTFSSVVELINHYR

SEQ ID NO: 8108 - protein, 40 aa, Artificial Sequence
  Description of Artificial Sequence: Synthetic polypeptide
NNKLIKIFHRDGKYGFSDPLTFSSVVELINHYRNESLAQY

SEQ ID NO: 8109 - protein, 40 aa, Artificial Sequence
  Description of Artificial Sequence: Synthetic polypeptide
LIKIFHRDGKYGFSDPLTFSSVVELINHYRNESLAQYNPK

SEQ ID NO: 8110 - protein, 40 aa, Artificial Sequence
  Description of Artificial Sequence: Synthetic polypeptide
RDGKYGFSDPLTFSSVVELINHYRNESLAQYNPKLDVKLL

SEQ ID NO: 8111 - protein, 40 aa, Artificial Sequence
  Description of Artificial Sequence: Synthetic polypeptide
DGKYGFSDPLTFSSVVELINHYRNESLAQYNPKLDVKLLY

SEQ ID NO: 8112 - protein, 40 aa, Artificial Sequence
  Description of Artificial Sequence: Synthetic polypeptide
DPLTFSSVVELINHYRNESLAQYNPKLDVKLLYPVSKYQQ

SEQ ID NO: 8113 - protein, 40 aa, Artificial Sequence
  Description of Artificial Sequence: Synthetic polypeptide
PLTFSSVVELINHYRNESLAQYNPKLDVKLLYPVSKYQQD

SEQ ID NO: 8114 - protein, 40 aa, Artificial Sequence
  Description of Artificial Sequence: Synthetic polypeptide
SVVELINHYRNESLAQYNPKLDVKLLYPVSKYQQDQVVKE

SEQ ID NO: 8115 - protein, 40 aa, Artificial Sequence
  Description of Artificial Sequence: Synthetic polypeptide
VELINHYRNESLAQYNPKLDVKLLYPVSKYQQDQVVKEDN

SEQ ID NO: 8116 - protein, 40 aa, Artificial Sequence
  Description of Artificial Sequence: Synthetic polypeptide
ELINHYRNESLAQYNPKLDVKLLYPVSKYQQDQVVKEDNI

SEQ ID NO: 8117 - protein, 40 aa, Artificial Sequence
  Description of Artificial Sequence: Synthetic polypeptide
HYRNESLAQYNPKLDVKLLYPVSKYQQDQVVKEDNIEAVG

SEQ ID NO: 8118 - protein, 40 aa, Artificial Sequence
  Description of Artificial Sequence: Synthetic polypeptide
NESLAQYNPKLDVKLLYPVSKYQQDQVVKEDNIEAVGKKL

SEQ ID NO: 8119 - protein, 40 aa, Artificial Sequence
  Description of Artificial Sequence: Synthetic polypeptide
YNPKLDVKLLYPVSKYQQDQVVKEDNIEAVGKKLHEYNTQ

SEQ ID NO: 8120 - protein, 40 aa, Artificial Sequence
  Description of Artificial Sequence: Synthetic polypeptide
PKLDVKLLYPVSKYQQDQVVKEDNIEAVGKKLHEYNTQFQ

SEQ ID NO: 8121 - protein, 40 aa, Artificial Sequence
  Description of Artificial Sequence: Synthetic polypeptide
VKLLYPVSKYQQDQVVKEDNIEAVGKKLHEYNTQFQEKSR

SEQ ID NO: 8122 - protein, 40 aa, Artificial Sequence
  Description of Artificial Sequence: Synthetic polypeptide
LYPVSKYQQDQVVKEDNIEAVGKKLHEYNTQFQEKSREYD

SEQ ID NO: 8123 - protein, 40 aa, Artificial Sequence
  Description of Artificial Sequence: Synthetic polypeptide
VSKYQQDQVVKEDNIEAVGKKLHEYNTQFQEKSREYDRLY

SEQ ID NO: 8124 - protein, 40 aa, Artificial Sequence
  Description of Artificial Sequence: Synthetic polypeptide
YQQDQVVKEDNIEAVGKKLHEYNTQFQEKSREYDRLYEEY

SEQ ID NO: 8125 - protein, 40 aa, Artificial Sequence
  Description of Artificial Sequence: Synthetic polypeptide
VVKEDNIEAVGKKLHEYNTQFQEKSREYDRLYEEYTRTSQ

SEQ ID NO: 8126 - protein, 40 aa, Artificial Sequence
  Description of Artificial Sequence: Synthetic polypeptide
DNIEAVGKKLHEYNTQFQEKSREYDRLYEEYTRTSQEIQM

SEQ ID NO: 8127 - protein, 40 aa, Artificial Sequence
  Description of Artificial Sequence: Synthetic polypeptide
AVGKKLHEYNTQFQEKSREYDRLYEEYTRTSQEIQMKRTA

SEQ ID NO: 8128 - protein, 40 aa, Artificial Sequence
  Description of Artificial Sequence: Synthetic polypeptide
GKKLHEYNTQFQEKSREYDRLYEEYTRTSQEIQMKRTAIE

SEQ ID NO: 8129 - protein, 40 aa, Artificial Sequence
  Description of Artificial Sequence: Synthetic polypeptide
KKLHEYNTQFQEKSREYDRLYEEYTRTSQEIQMKRTAIEA

SEQ ID NO: 8130 - protein, 40 aa, Artificial Sequence
  Description of Artificial Sequence: Synthetic polypeptide
KLHEYNTQFQEKSREYDRLYEEYTRTSQEIQMKRTAIEAF

SEQ ID NO: 8131 - protein, 40 aa, Artificial Sequence
  Description of Artificial Sequence: Synthetic polypeptide
LHEYNTQFQEKSREYDRLYEEYTRTSQEIQMKRTAIEAFN

SEQ ID NO: 8132 - protein, 40 aa, Artificial Sequence
  Description of Artificial Sequence: Synthetic polypeptide
HEYNTQFQEKSREYDRLYEEYTRTSQEIQMKRTAIEAFNE

SEQ ID NO: 8133 - protein, 40 aa, Artificial Sequence
  Description of Artificial Sequence: Synthetic polypeptide
EYNTQFQEKSREYDRLYEEYTRTSQEIQMKRTAIEAFNET

SEQ ID NO: 8134 - protein, 40 aa, Artificial Sequence
  Description of Artificial Sequence: Synthetic polypeptide
YNTQFQEKSREYDRLYEEYTRTSQEIQMKRTAIEAFNETI

SEQ ID NO: 8135 - protein, 40 aa, Artificial Sequence
  Description of Artificial Sequence: Synthetic polypeptide
TQFQEKSREYDRLYEEYTRTSQEIQMKRTAIEAFNETIKI

SEQ ID NO: 8136 - protein, 40 aa, Artificial Sequence
  Description of Artificial Sequence: Synthetic polypeptide
FQEKSREYDRLYEEYTRTSQEIQMKRTAIEAFNETIKIFE

SEQ ID NO: 8137 - protein, 40 aa, Artificial Sequence
  Description of Artificial Sequence: Synthetic polypeptide
RLYEEYTRTSQEIQMKRTAIEAFNETIKIFEEQCQTQERY

SEQ ID NO: 8138 - protein, 40 aa, Artificial Sequence
  Description of Artificial Sequence: Synthetic polypeptide
LYEEYTRTSQEIQMKRTAIEAFNETIKIFEEQCQTQERYS

SEQ ID NO: 8139 - protein, 40 aa, Artificial Sequence
  Description of Artificial Sequence: Synthetic polypeptide
RTSQEIQMKRTAIEAFNETIKIFEEQCQTQERYSKEYIEK

SEQ ID NO: 8140 - protein, 40 aa, Artificial Sequence
  Description of Artificial Sequence: Synthetic polypeptide
QEIQMKRTAIEAFNETIKIFEEQCQTQERYSKEYIEKFKR

SEQ ID NO: 8141 - protein, 40 aa, Artificial Sequence
  Description of Artificial Sequence: Synthetic polypeptide
EIQMKRTAIEAFNETIKIFEEQCQTQERYSKEYIEKFKRE

SEQ ID NO: 8142 - protein, 40 aa, Artificial Sequence
  Description of Artificial Sequence: Synthetic polypeptide
QMKRTAIEAFNETIKIFEEQCQTQERYSKEYIEKFKREGN

SEQ ID NO: 8143 - protein, 40 aa, Artificial Sequence
  Description of Artificial Sequence: Synthetic polypeptide
EAFNETIKIFEEQCQTQERYSKEYIEKFKREGNEKEIQRI

SEQ ID NO: 8144 - protein, 40 aa, Artificial Sequence
  Description of Artificial Sequence: Synthetic polypeptide
ETIKIFEEQCQTQERYSKEYIEKFKREGNEKEIQRIMHNY

SEQ ID NO: 8145 - protein, 40 aa, Artificial Sequence
  Description of Artificial Sequence: Synthetic polypeptide
ERYSKEYIEKFKREGNEKEIQRIMHNYDKLKSRISEIIDS

SEQ ID NO: 8146 - protein, 40 aa, Artificial Sequence
  Description of Artificial Sequence: Synthetic polypeptide
RYSKEYIEKFKREGNEKEIQRIMHNYDKLKSRISEIIDSR

SEQ ID NO: 8147 - protein, 40 aa, Artificial Sequence
  Description of Artificial Sequence: Synthetic polypeptide
SKEYIEKFKREGNEKEIQRIMHNYDKLKSRISEIIDSRRR

SEQ ID NO: 8148 - protein, 40 aa, Artificial Sequence
  Description of Artificial Sequence: Synthetic polypeptide
KEYIEKFKREGNEKEIQRIMHNYDKLKSRISEIIDSRRRL

SEQ ID NO: 8149 - protein, 40 aa, Artificial Sequence
  Description of Artificial Sequence: Synthetic polypeptide
YIEKFKREGNEKEIQRIMHNYDKLKSRISEIIDSRRRLEE

SEQ ID NO: 8150 - protein, 40 aa, Artificial Sequence
  Description of Artificial Sequence: Synthetic polypeptide
IEKFKREGNEKEIQRIMHNYDKLKSRISEIIDSRRRLEED

SEQ ID NO: 8151 - protein, 40 aa, Artificial Sequence
  Description of Artificial Sequence: Synthetic polypeptide
KREGNEKEIQRIMHNYDKLKSRISEIIDSRRRLEEDLKKQ

SEQ ID NO: 8152 - protein, 40 aa, Artificial Sequence
  Description of Artificial Sequence: Synthetic polypeptide
EGNEKEIQRIMHNYDKLKSRISEIIDSRRRLEEDLKKQAA

SEQ ID NO: 8153 - protein, 40 aa, Artificial Sequence
  Description of Artificial Sequence: Synthetic polypeptide
EKEIQRIMHNYDKLKSRISEIIDSRRRLEEDLKKQAAEYR

SEQ ID NO: 8154 - protein, 40 aa, Artificial Sequence
  Description of Artificial Sequence: Synthetic polypeptide
KEIQRIMHNYDKLKSRISEIIDSRRRLEEDLKKQAAEYRE

SEQ ID NO: 8155 - protein, 40 aa, Artificial Sequence
  Description of Artificial Sequence: Synthetic polypeptide
IQRIMHNYDKLKSRISEIIDSRRRLEEDLKKQAAEYREID

SEQ ID NO: 8156 - protein, 40 aa, Artificial Sequence
  Description of Artificial Sequence: Synthetic polypeptide
QRIMHNYDKLKSRISEIIDSRRRLEEDLKKQAAEYREIDK

SEQ ID NO: 8157 - protein, 40 aa, Artificial Sequence
  Description of Artificial Sequence: Synthetic polypeptide
RIMHNYDKLKSRISEIIDSRRRLEEDLKKQAAEYREIDKR

SEQ ID NO: 8158 - protein, 40 aa, Artificial Sequence
  Description of Artificial Sequence: Synthetic polypeptide
IMHNYDKLKSRISEIIDSRRRLEEDLKKQAAEYREIDKRM

SEQ ID NO: 8159 - protein, 40 aa, Artificial Sequence
  Description of Artificial Sequence: Synthetic polypeptide
NYDKLKSRISEIIDSRRRLEEDLKKQAAEYREIDKRMNSI

SEQ ID NO: 8160 - protein, 40 aa, Artificial Sequence
  Description of Artificial Sequence: Synthetic polypeptide
SRISEIIDSRRRLEEDLKKQAAEYREIDKRMNSIKPDLIQ

SEQ ID NO: 8161 - protein, 40 aa, Artificial Sequence
  Description of Artificial Sequence: Synthetic polypeptide
RISEIIDSRRRLEEDLKKQAAEYREIDKRMNSIKPDLIQL

SEQ ID NO: 8162 - protein, 40 aa, Artificial Sequence
  Description of Artificial Sequence: Synthetic polypeptide
EIIDSRRRLEEDLKKQAAEYREIDKRMNSIKPDLIQLRKT

SEQ ID NO: 8163 - protein, 40 aa, Artificial Sequence
  Description of Artificial Sequence: Synthetic polypeptide
IDSRRRLEEDLKKQAAEYREIDKRMNSIKPDLIQLRKTRD

SEQ ID NO: 8164 - protein, 40 aa, Artificial Sequence
  Description of Artificial Sequence: Synthetic polypeptide
SRRRLEEDLKKQAAEYREIDKRMNSIKPDLIQLRKTRDQY

SEQ ID NO: 8165 - protein, 40 aa, Artificial Sequence
  Description of Artificial Sequence: Synthetic polypeptide
RLEEDLKKQAAEYREIDKRMNSIKPDLIQLRKTRDQYLMW

SEQ ID NO: 8166 - protein, 40 aa, Artificial Sequence
  Description of Artificial Sequence: Synthetic polypeptide
VRQKKLNEWLGNENTEDQYSLVEDDEDLPHHDEKTWNVGS

SEQ ID NO: 8167 - protein, 40 aa, Artificial Sequence
  Description of Artificial Sequence: Synthetic polypeptide
WLGNENTEDQYSLVEDDEDLPHHDEKTWNVGSSNRNKAEN

SEQ ID NO: 8168 - protein, 40 aa, Artificial Sequence
  Description of Artificial Sequence: Synthetic polypeptide
VRESSKQGCYACSVVVDGEVKHCVINKTATGYGFAEPYNL

SEQ ID NO: 8169 - protein, 40 aa, Artificial Sequence
  Description of Artificial Sequence: Synthetic polypeptide
SSKQGCYACSVVVDGEVKHCVINKTATGYGFAEPYNLYSS

SEQ ID NO: 8170 - protein, 40 aa, Artificial Sequence
  Description of Artificial Sequence: Synthetic polypeptide
SKQGCYACSVVVDGEVKHCVINKTATGYGFAEPYNLYSSL

SEQ ID NO: 8171 - protein, 40 aa, Artificial Sequence
  Description of Artificial Sequence: Synthetic polypeptide
KQGCYACSVVVDGEVKHCVINKTATGYGFAEPYNLYSSLK

SEQ ID NO: 8172 - protein, 40 aa, Artificial Sequence
  Description of Artificial Sequence: Synthetic polypeptide
QGCYACSVVVDGEVKHCVINKTATGYGFAEPYNLYSSLKE

SEQ ID NO: 8173 - protein, 40 aa, Artificial Sequence
  Description of Artificial Sequence: Synthetic polypeptide
VVVDGEVKHCVINKTATGYGFAEPYNLYSSLKELVLHYQH

SEQ ID NO: 8174 - protein, 40 aa, Artificial Sequence
  Description of Artificial Sequence: Synthetic polypeptide
DGEVKHCVINKTATGYGFAEPYNLYSSLKELVLHYQHTSL

SEQ ID NO: 8175 - protein, 40 aa, Artificial Sequence
  Description of Artificial Sequence: Synthetic polypeptide
VKHCVINKTATGYGFAEPYNLYSSLKELVLHYQHTSLVQH

SEQ ID NO: 8176 - protein, 40 aa, Artificial Sequence
  Description of Artificial Sequence: Synthetic polypeptide
HCVINKTATGYGFAEPYNLYSSLKELVLHYQHTSLVQHND

SEQ ID NO: 8177 - protein, 40 aa, Artificial Sequence
  Description of Artificial Sequence: Synthetic polypeptide
TATGYGFAEPYNLYSSLKELVLHYQHTSLVQHNDSLNVTL

SEQ ID NO: 8178 - protein, 40 aa, Artificial Sequence
  Description of Artificial Sequence: Synthetic polypeptide
YGFAEPYNLYSSLKELVLHYQHTSLVQHNDSLNVTLAYPV

SEQ ID NO: 8179 - protein, 40 aa, Artificial Sequence
  Description of Artificial Sequence: Synthetic polypeptide
FAEPYNLYSSLKELVLHYQHTSLVQHNDSLNVTLAYPVYA

SEQ ID NO: 8180 - protein, 40 aa, Artificial Sequence
  Description of Artificial Sequence: Synthetic polypeptide
YNLYSSLKELVLHYQHTSLVQHNDSLNVTLAYPVYAQQRR

SEQ ID NO: 8181 - protein, 40 aa, Artificial Sequence
  Description of Artificial Sequence: Synthetic polypeptide
RAISHEHSPSDLEAHFVPLVKRLAGGDWFTSRTSACGLFS

SEQ ID NO: 8182 - protein, 40 aa, Artificial Sequence
  Description of Artificial Sequence: Synthetic polypeptide
SHEHSPSDLEAHFVPLVKRLAGGDWFTSRTSACGLFSVCY

SEQ ID NO: 8183 - protein, 40 aa, Artificial Sequence
  Description of Artificial Sequence: Synthetic polypeptide
SPSDLEAHFVPLVKRLAGGDWFTSRTSACGLFSVCYPRVS

SEQ ID NO: 8184 - protein, 40 aa, Artificial Sequence
  Description of Artificial Sequence: Synthetic polypeptide
PSDLEAHFVPLVKRLAGGDWFTSRTSACGLFSVCYPRVSS

SEQ ID NO: 8185 - protein, 40 aa, Artificial Sequence
  Description of Artificial Sequence: Synthetic polypeptide
SDLEAHFVPLVKRLAGGDWFTSRTSACGLFSVCYPRVSSA

SEQ ID NO: 8186 - protein, 40 aa, Artificial Sequence
  Description of Artificial Sequence: Synthetic polypeptide
LVKRLAGGDWFTSRTSACGLFSVCYPRVSSAVKAELRQYF

SEQ ID NO: 8187 - protein, 40 aa, Artificial Sequence
  Description of Artificial Sequence: Synthetic polypeptide
VKRLAGGDWFTSRTSACGLFSVCYPRVSSAVKAELRQYFR

SEQ ID NO: 8188 - protein, 40 aa, Artificial Sequence
  Description of Artificial Sequence: Synthetic polypeptide
WFTSRTSACGLFSVCYPRVSSAVKAELRQYFRNLCSDDTP

SEQ ID NO: 8189 - protein, 40 aa, Artificial Sequence
  Description of Artificial Sequence: Synthetic polypeptide
MEALVMPTLRQAAEDKSWRVRYMVADKFTELQKAVGPEIT

SEQ ID NO: 8190 - protein, 40 aa, Artificial Sequence
  Description of Artificial Sequence: Synthetic polypeptide
EITKTDLVPAFQNLMKDCEAEVRAAASHKVKEFCENLSAD

SEQ ID NO: 8191 - protein, 40 aa, Artificial Sequence
  Description of Artificial Sequence: Synthetic polypeptide
KVKEFCENLSADCRENVIMSQILPCIKELVSDANQHVKSA

SEQ ID NO: 8192 - protein, 40 aa, Artificial Sequence
  Description of Artificial Sequence: Synthetic polypeptide
NTIEHLLPLFLAQLKDECPEVRLNIISNLDCVNEVIGIRQ

SEQ ID NO: 8193 - protein, 40 aa, Artificial Sequence
  Description of Artificial Sequence: Synthetic polypeptide
QLKDECPEVRLNIISNLDCVNEVIGIRQLSQSLLPAIVEL

SEQ ID NO: 8194 - protein, 40 aa, Artificial Sequence
  Description of Artificial Sequence: Synthetic polypeptide
MSQSLLPAIVELAEDAKWRVRLAIIEYMPLLAGQLGVEFF

SEQ ID NO: 8195 - protein, 40 aa, Artificial Sequence
  Description of Artificial Sequence: Synthetic polypeptide
ELAEDAKWRVRLAIIEYMPLLAGQLGVEFFDEKLNSLCMA

SEQ ID NO: 8196 - protein, 40 aa, Artificial Sequence
  Description of Artificial Sequence: Synthetic polypeptide
AIIEYMPLLAGQLGVEFFDEKLNSLCMAWLVDHVYAIREA

SEQ ID NO: 8197 - protein, 40 aa, Artificial Sequence
  Description of Artificial Sequence: Synthetic polypeptide
QLGVEFFDEKLNSLCMAWLVDHVYAIREAATSNLKKLVEK

SEQ ID NO: 8198 - protein, 40 aa, Artificial Sequence
  Description of Artificial Sequence: Synthetic polypeptide
FGKEWAHATIIPKVLAMSGDPNYLHRMTTLFCINVLSEVC

SEQ ID NO: 8199 - protein, 40 aa, Artificial Sequence
  Description of Artificial Sequence: Synthetic polypeptide
VLAMSGDPNYLHRMTTLFCINVLSEVCGQDITTKHMLPTV

SEQ ID NO: 8200 - protein, 40 aa, Artificial Sequence
  Description of Artificial Sequence: Synthetic polypeptide
HMLPTVLRMAGDPVANVRFNVAKSLQKIGPILDNSTLQSE

SEQ ID NO: 8201 - protein, 40 aa, Artificial Sequence
  Description of Artificial Sequence: Synthetic polypeptide
RFNVAKSLQKIGPILDNSTLQSEVKPILEKLTQDQDVDVK

SEQ ID NO: 8202 - protein, 40 aa, Artificial Sequence
  Description of Artificial Sequence: Synthetic polypeptide
TGVEAENLLLTRGVDGSFLARPSKSNPGDFTLSVRRNGAV

SEQ ID NO: 8203 - protein, 40 aa, Artificial Sequence
  Description of Artificial Sequence: Synthetic polypeptide
EAENLLLTRGVDGSFLARPSKSNPGDFTLSVRRNGAVTHI

SEQ ID NO: 8204 - protein, 40 aa, Artificial Sequence
  Description of Artificial Sequence: Synthetic polypeptide
AENLLLTRGVDGSFLARPSKSNPGDFTLSVRRNGAVTHIK

SEQ ID NO: 8205 - protein, 40 aa, Artificial Sequence
  Description of Artificial Sequence: Synthetic polypeptide
NLLLTRGVDGSFLARPSKSNPGDFTLSVRRNGAVTHIKIQ

SEQ ID NO: 8206 - protein, 40 aa, Artificial Sequence
  Description of Artificial Sequence: Synthetic polypeptide
GSFLARPSKSNPGDFTLSVRRNGAVTHIKIQNTGDYYDLY

SEQ ID NO: 8207 - protein, 40 aa, Artificial Sequence
  Description of Artificial Sequence: Synthetic polypeptide
SVRRNGAVTHIKIQNTGDYYDLYGGEKFATLAELVQYYME

SEQ ID NO: 8208 - protein, 40 aa, Artificial Sequence
  Description of Artificial Sequence: Synthetic polypeptide
RNGAVTHIKIQNTGDYYDLYGGEKFATLAELVQYYMEHHG

SEQ ID NO: 8209 - protein, 40 aa, Artificial Sequence
  Description of Artificial Sequence: Synthetic polypeptide
YYDLYGGEKFATLAELVQYYMEHHGQLKEKNGDVIELKYP

SEQ ID NO: 8210 - protein, 40 aa, Artificial Sequence
  Description of Artificial Sequence: Synthetic polypeptide
GGEKFATLAELVQYYMEHHGQLKEKNGDVIELKYPLNCAD

SEQ ID NO: 8211 - protein, 40 aa, Artificial Sequence
  Description of Artificial Sequence: Synthetic polypeptide
YPLNCADPTSERWFHGHLSGKEAEKLLTEKGKHGSFLVRE

SEQ ID NO: 8212 - protein, 40 aa, Artificial Sequence
  Description of Artificial Sequence: Synthetic polypeptide
CADPTSERWFHGHLSGKEAEKLLTEKGKHGSFLVRESQSH

SEQ ID NO: 8213 - protein, 40 aa, Artificial Sequence
  Description of Artificial Sequence: Synthetic polypeptide
ADPTSERWFHGHLSGKEAEKLLTEKGKHGSFLVRESQSHP

SEQ ID NO: 8214 - protein, 40 aa, Artificial Sequence
  Description of Artificial Sequence: Synthetic polypeptide
TSERWFHGHLSGKEAEKLLTEKGKHGSFLVRESQSHPGDF

SEQ ID NO: 8215 - protein, 40 aa, Artificial Sequence
  Description of Artificial Sequence: Synthetic polypeptide
SERWFHGHLSGKEAEKLLTEKGKHGSFLVRESQSHPGDFV

SEQ ID NO: 8216 - protein, 40 aa, Artificial Sequence
  Description of Artificial Sequence: Synthetic polypeptide
ERWFHGHLSGKEAEKLLTEKGKHGSFLVRESQSHPGDFVL

SEQ ID NO: 8217 - protein, 40 aa, Artificial Sequence
  Description of Artificial Sequence: Synthetic polypeptide
RWFHGHLSGKEAEKLLTEKGKHGSFLVRESQSHPGDFVLS

SEQ ID NO: 8218 - protein, 40 aa, Artificial Sequence
  Description of Artificial Sequence: Synthetic polypeptide
WFHGHLSGKEAEKLLTEKGKHGSFLVRESQSHPGDFVLSV

SEQ ID NO: 8219 - protein, 40 aa, Artificial Sequence
  Description of Artificial Sequence: Synthetic polypeptide
FHGHLSGKEAEKLLTEKGKHGSFLVRESQSHPGDFVLSVR

SEQ ID NO: 8220 - protein, 40 aa, Artificial Sequence
  Description of Artificial Sequence: Synthetic polypeptide
HGHLSGKEAEKLLTEKGKHGSFLVRESQSHPGDFVLSVRT

SEQ ID NO: 8221 - protein, 40 aa, Artificial Sequence
  Description of Artificial Sequence: Synthetic polypeptide
KEAEKLLTEKGKHGSFLVRESQSHPGDFVLSVRTGDDKGE

SEQ ID NO: 8222 - protein, 40 aa, Artificial Sequence
  Description of Artificial Sequence: Synthetic polypeptide
AEKLLTEKGKHGSFLVRESQSHPGDFVLSVRTGDDKGESN

SEQ ID NO: 8223 - protein, 40 aa, Artificial Sequence
  Description of Artificial Sequence: Synthetic polypeptide
EKLLTEKGKHGSFLVRESQSHPGDFVLSVRTGDDKGESND

SEQ ID NO: 8224 - protein, 40 aa, Artificial Sequence
  Description of Artificial Sequence: Synthetic polypeptide
KLLTEKGKHGSFLVRESQSHPGDFVLSVRTGDDKGESNDG

SEQ ID NO: 8225 - protein, 40 aa, Artificial Sequence
  Description of Artificial Sequence: Synthetic polypeptide
LLTEKGKHGSFLVRESQSHPGDFVLSVRTGDDKGESNDGK

SEQ ID NO: 8226 - protein, 40 aa, Artificial Sequence
  Description of Artificial Sequence: Synthetic polypeptide
LTEKGKHGSFLVRESQSHPGDFVLSVRTGDDKGESNDGKS

SEQ ID NO: 8227 - protein, 40 aa, Artificial Sequence
  Description of Artificial Sequence: Synthetic polypeptide
EKGKHGSFLVRESQSHPGDFVLSVRTGDDKGESNDGKSKV

SEQ ID NO: 8228 - protein, 40 aa, Artificial Sequence
  Description of Artificial Sequence: Synthetic polypeptide
GSFLVRESQSHPGDFVLSVRTGDDKGESNDGKSKVTHVMI

SEQ ID NO: 8229 - protein, 40 aa, Artificial Sequence
  Description of Artificial Sequence: Synthetic polypeptide
QSHPGDFVLSVRTGDDKGESNDGKSKVTHVMIRCQELKYD

SEQ ID NO: 8230 - protein, 40 aa, Artificial Sequence
  Description of Artificial Sequence: Synthetic polypeptide
NDGKSKVTHVMIRCQELKYDVGGGERFDSLTDLVEHYKKN

SEQ ID NO: 8231 - protein, 40 aa, Artificial Sequence
  Description of Artificial Sequence: Synthetic polypeptide
THVMIRCQELKYDVGGGERFDSLTDLVEHYKKNPMVETLG

SEQ ID NO: 8232 - protein, 40 aa, Artificial Sequence
  Description of Artificial Sequence: Synthetic polypeptide
MIRCQELKYDVGGGERFDSLTDLVEHYKKNPMVETLGTVL

SEQ ID NO: 8233 - protein, 40 aa, Artificial Sequence
  Description of Artificial Sequence: Synthetic polypeptide
IRCQELKYDVGGGERFDSLTDLVEHYKKNPMVETLGTVLQ

SEQ ID NO: 8234 - protein, 40 aa, Artificial Sequence
  Description of Artificial Sequence: Synthetic polypeptide
CQELKYDVGGGERFDSLTDLVEHYKKNPMVETLGTVLQLK

SEQ ID NO: 8235 - protein, 40 aa, Artificial Sequence
  Description of Artificial Sequence: Synthetic polypeptide
ELKYDVGGGERFDSLTDLVEHYKKNPMVETLGTVLQLKQP

SEQ ID NO: 8236 - protein, 40 aa, Artificial Sequence
  Description of Artificial Sequence: Synthetic polypeptide
KYDVGGGERFDSLTDLVEHYKKNPMVETLGTVLQLKQPLN

SEQ ID NO: 8237 - protein, 40 aa, Artificial Sequence
  Description of Artificial Sequence: Synthetic polypeptide
GGGERFDSLTDLVEHYKKNPMVETLGTVLQLKQPLNTTRI

SEQ ID NO: 8238 - protein, 40 aa, Artificial Sequence
  Description of Artificial Sequence: Synthetic polypeptide
DLVEHYKKNPMVETLGTVLQLKQPLNTTRINAAEIESRVR

SEQ ID NO: 8239 - protein, 40 aa, Artificial Sequence
  Description of Artificial Sequence: Synthetic polypeptide
HYKKNPMVETLGTVLQLKQPLNTTRINAAEIESRVRELSK

SEQ ID NO: 8240 - protein, 40 aa, Artificial Sequence
  Description of Artificial Sequence: Synthetic polypeptide
YKKNPMVETLGTVLQLKQPLNTTRINAAEIESRVRELSKL

SEQ ID NO: 8241 - protein, 40 aa, Artificial Sequence
  Description of Artificial Sequence: Synthetic polypeptide
PMVETLGTVLQLKQPLNTTRINAAEIESRVRELSKLAETT

SEQ ID NO: 8242 - protein, 40 aa, Artificial Sequence
  Description of Artificial Sequence: Synthetic polypeptide
MVETLGTVLQLKQPLNTTRINAAEIESRVRELSKLAETTD

SEQ ID NO: 8243 - protein, 40 aa, Artificial Sequence
  Description of Artificial Sequence: Synthetic polypeptide
GTVLQLKQPLNTTRINAAEIESRVRELSKLAETTDKVKQG

SEQ ID NO: 8244 - protein, 40 aa, Artificial Sequence
  Description of Artificial Sequence: Synthetic polypeptide
LQLKQPLNTTRINAAEIESRVRELSKLAETTDKVKQGFWE

SEQ ID NO: 8245 - protein, 40 aa, Artificial Sequence
  Description of Artificial Sequence: Synthetic polypeptide
KQPLNTTRINAAEIESRVRELSKLAETTDKVKQGFWEEFE

SEQ ID NO: 8246 - protein, 40 aa, Artificial Sequence
  Description of Artificial Sequence: Synthetic polypeptide
TTRINAAEIESRVRELSKLAETTDKVKQGFWEEFETLQQQ

SEQ ID NO: 8247 - protein, 40 aa, Artificial Sequence
  Description of Artificial Sequence: Synthetic polypeptide
EIESRVRELSKLAETTDKVKQGFWEEFETLQQQECKLLYS

SEQ ID NO: 8248 - protein, 40 aa, Artificial Sequence
  Description of Artificial Sequence: Synthetic polypeptide
RELSKLAETTDKVKQGFWEEFETLQQQECKLLYSRKEGQR

SEQ ID NO: 8249 - protein, 40 aa, Artificial Sequence
  Description of Artificial Sequence: Synthetic polypeptide
ELSKLAETTDKVKQGFWEEFETLQQQECKLLYSRKEGQRQ

SEQ ID NO: 8250 - protein, 40 aa, Artificial Sequence
  Description of Artificial Sequence: Synthetic polypeptide
LSKLAETTDKVKQGFWEEFETLQQQECKLLYSRKEGQRQE

SEQ ID NO: 8251 - protein, 40 aa, Artificial Sequence
  Description of Artificial Sequence: Synthetic polypeptide
KLAETTDKVKQGFWEEFETLQQQECKLLYSRKEGQRQENK

SEQ ID NO: 8252 - protein, 40 aa, Artificial Sequence
  Description of Artificial Sequence: Synthetic polypeptide
AETTDKVKQGFWEEFETLQQQECKLLYSRKEGQRQENKNK

SEQ ID NO: 8253 - protein, 40 aa, Artificial Sequence
  Description of Artificial Sequence: Synthetic polypeptide
ETTDKVKQGFWEEFETLQQQECKLLYSRKEGQRQENKNKN

SEQ ID NO: 8254 - protein, 40 aa, Artificial Sequence
  Description of Artificial Sequence: Synthetic polypeptide
TDKVKQGFWEEFETLQQQECKLLYSRKEGQRQENKNKNRY

SEQ ID NO: 8255 - protein, 40 aa, Artificial Sequence
  Description of Artificial Sequence: Synthetic polypeptide
GFWEEFETLQQQECKLLYSRKEGQRQENKNKNRYKNILPF

SEQ ID NO: 8256 - protein, 40 aa, Artificial Sequence
  Description of Artificial Sequence: Synthetic polypeptide
FWEEFETLQQQECKLLYSRKEGQRQENKNKNRYKNILPFD

SEQ ID NO: 8257 - protein, 40 aa, Artificial Sequence
  Description of Artificial Sequence: Synthetic polypeptide
WEEFETLQQQECKLLYSRKEGQRQENKNKNRYKNILPFDH

SEQ ID NO: 8258 - protein, 40 aa, Artificial Sequence
  Description of Artificial Sequence: Synthetic polypeptide
EEFETLQQQECKLLYSRKEGQRQENKNKNRYKNILPFDHT

SEQ ID NO: 8259 - protein, 40 aa, Artificial Sequence
  Description of Artificial Sequence: Synthetic polypeptide
EFETLQQQECKLLYSRKEGQRQENKNKNRYKNILPFDHTR

SEQ ID NO: 8260 - protein, 40 aa, Artificial Sequence
  Description of Artificial Sequence: Synthetic polypeptide
FETLQQQECKLLYSRKEGQRQENKNKNRYKNILPFDHTRV

SEQ ID NO: 8261 - protein, 40 aa, Artificial Sequence
  Description of Artificial Sequence: Synthetic polypeptide
TLQQQECKLLYSRKEGQRQENKNKNRYKNILPFDHTRVVL

SEQ ID NO: 8262 - protein, 40 aa, Artificial Sequence
  Description of Artificial Sequence: Synthetic polypeptide
QQQECKLLYSRKEGQRQENKNKNRYKNILPFDHTRVVLHD

SEQ ID NO: 8263 - protein, 40 aa, Artificial Sequence
  Description of Artificial Sequence: Synthetic polypeptide
QQECKLLYSRKEGQRQENKNKNRYKNILPFDHTRVVLHDG

SEQ ID NO: 8264 - protein, 40 aa, Artificial Sequence
  Description of Artificial Sequence: Synthetic polypeptide
QECKLLYSRKEGQRQENKNKNRYKNILPFDHTRVVLHDGD

SEQ ID NO: 8265 - protein, 40 aa, Artificial Sequence
  Description of Artificial Sequence: Synthetic polypeptide
ECKLLYSRKEGQRQENKNKNRYKNILPFDHTRVVLHDGDP

SEQ ID NO: 8266 - protein, 40 aa, Artificial Sequence
  Description of Artificial Sequence: Synthetic polypeptide
CKLLYSRKEGQRQENKNKNRYKNILPFDHTRVVLHDGDPN

SEQ ID NO: 8267 - protein, 40 aa, Artificial Sequence
  Description of Artificial Sequence: Synthetic polypeptide
KLLYSRKEGQRQENKNKNRYKNILPFDHTRVVLHDGDPNE

SEQ ID NO: 8268 - protein, 40 aa, Artificial Sequence
  Description of Artificial Sequence: Synthetic polypeptide
LLYSRKEGQRQENKNKNRYKNILPFDHTRVVLHDGDPNEP

SEQ ID NO: 8269 - protein, 40 aa, Artificial Sequence
  Description of Artificial Sequence: Synthetic polypeptide
YSRKEGQRQENKNKNRYKNILPFDHTRVVLHDGDPNEPVS

SEQ ID NO: 8270 - protein, 40 aa, Artificial Sequence
  Description of Artificial Sequence: Synthetic polypeptide
SRKEGQRQENKNKNRYKNILPFDHTRVVLHDGDPNEPVSD

SEQ ID NO: 8271 - protein, 40 aa, Artificial Sequence
  Description of Artificial Sequence: Synthetic polypeptide
RKEGQRQENKNKNRYKNILPFDHTRVVLHDGDPNEPVSDY

SEQ ID NO: 8272 - protein, 40 aa, Artificial Sequence
  Description of Artificial Sequence: Synthetic polypeptide
KEGQRQENKNKNRYKNILPFDHTRVVLHDGDPNEPVSDYI

SEQ ID NO: 8273 - protein, 40 aa, Artificial Sequence
  Description of Artificial Sequence: Synthetic polypeptide
EGQRQENKNKNRYKNILPFDHTRVVLHDGDPNEPVSDYIN

SEQ ID NO: 8274 - protein, 40 aa, Artificial Sequence
  Description of Artificial Sequence: Synthetic polypeptide
NKNKNRYKNILPFDHTRVVLHDGDPNEPVSDYINANIIMP

SEQ ID NO: 8275 - protein, 40 aa, Artificial Sequence
  Description of Artificial Sequence: Synthetic polypeptide
KNRYKNILPFDHTRVVLHDGDPNEPVSDYINANIIMPEFE

SEQ ID NO: 8276 - protein, 40 aa, Artificial Sequence
  Description of Artificial Sequence: Synthetic polypeptide
NRYKNILPFDHTRVVLHDGDPNEPVSDYINANIIMPEFET

SEQ ID NO: 8277 - protein, 40 aa, Artificial Sequence
  Description of Artificial Sequence: Synthetic polypeptide
QGCLQNTVNDFWRMVFQENSRVIVMTTKEVERGKSKCVKY

SEQ ID NO: 8278 - protein, 40 aa, Artificial Sequence
  Description of Artificial Sequence: Synthetic polypeptide
MVFQENSRVIVMTTKEVERGKSKCVKYWPDEYALKEYGVM

SEQ ID NO: 8279 - protein, 40 aa, Artificial Sequence
  Description of Artificial Sequence: Synthetic polypeptide
QENSRVIVMTTKEVERGKSKCVKYWPDEYALKEYGVMRVR

SEQ ID NO: 8280 - protein, 40 aa, Artificial Sequence
  Description of Artificial Sequence: Synthetic polypeptide
TTKEVERGKSKCVKYWPDEYALKEYGVMRVRNVKESAAHD

SEQ ID NO: 8281 - protein, 40 aa, Artificial Sequence
  Description of Artificial Sequence: Synthetic polypeptide
KCVKYWPDEYALKEYGVMRVRNVKESAAHDYTLRELKLSK

SEQ ID NO: 8282 - protein, 40 aa, Artificial Sequence
  Description of Artificial Sequence: Synthetic polypeptide
CVKYWPDEYALKEYGVMRVRNVKESAAHDYTLRELKLSKV

SEQ ID NO: 8283 - protein, 40 aa, Artificial Sequence
  Description of Artificial Sequence: Synthetic polypeptide
VKYWPDEYALKEYGVMRVRNVKESAAHDYTLRELKLSKVG

SEQ ID NO: 8284 - protein, 40 aa, Artificial Sequence
  Description of Artificial Sequence: Synthetic polypeptide
PDEYALKEYGVMRVRNVKESAAHDYTLRELKLSKVGQGNT

SEQ ID NO: 8285 - protein, 40 aa, Artificial Sequence
  Description of Artificial Sequence: Synthetic polypeptide
DEYALKEYGVMRVRNVKESAAHDYTLRELKLSKVGQGNTE

SEQ ID NO: 8286 - protein, 40 aa, Artificial Sequence
  Description of Artificial Sequence: Synthetic polypeptide
LKEYGVMRVRNVKESAAHDYTLRELKLSKVGQGNTERTVW

SEQ ID NO: 8287 - protein, 40 aa, Artificial Sequence
  Description of Artificial Sequence: Synthetic polypeptide
KEYGVMRVRNVKESAAHDYTLRELKLSKVGQGNTERTVWQ

SEQ ID NO: 8288 - protein, 40 aa, Artificial Sequence
  Description of Artificial Sequence: Synthetic polypeptide
EYGVMRVRNVKESAAHDYTLRELKLSKVGQGNTERTVWQY

SEQ ID NO: 8289 - protein, 40 aa, Artificial Sequence
  Description of Artificial Sequence: Synthetic polypeptide
GVMRVRNVKESAAHDYTLRELKLSKVGQGNTERTVWQYHF

SEQ ID NO: 8290 - protein, 40 aa, Artificial Sequence
  Description of Artificial Sequence: Synthetic polypeptide
VMRVRNVKESAAHDYTLRELKLSKVGQGNTERTVWQYHFR

SEQ ID NO: 8291 - protein, 40 aa, Artificial Sequence
  Description of Artificial Sequence: Synthetic polypeptide
EVHHKQESIMDAGPVVVHCSAGIGRTGTFIVIDILIDIIR

SEQ ID NO: 8292 - protein, 40 aa, Artificial Sequence
  Description of Artificial Sequence: Synthetic polypeptide
HHKQESIMDAGPVVVHCSAGIGRTGTFIVIDILIDIIREK

SEQ ID NO: 8293 - protein, 40 aa, Artificial Sequence
  Description of Artificial Sequence: Synthetic polypeptide
KQESIMDAGPVVVHCSAGIGRTGTFIVIDILIDIIREKGV

SEQ ID NO: 8294 - protein, 40 aa, Artificial Sequence
  Description of Artificial Sequence: Synthetic polypeptide
ESIMDAGPVVVHCSAGIGRTGTFIVIDILIDIIREKGVDC

SEQ ID NO: 8295 - protein, 40 aa, Artificial Sequence
  Description of Artificial Sequence: Synthetic polypeptide
DAGPVVVHCSAGIGRTGTFIVIDILIDIIREKGVDCDIDV

SEQ ID NO: 8296 - protein, 40 aa, Artificial Sequence
  Description of Artificial Sequence: Synthetic polypeptide
VVHCSAGIGRTGTFIVIDILIDIIREKGVDCDIDVPKTIQ

SEQ ID NO: 8297 - protein, 40 aa, Artificial Sequence
  Description of Artificial Sequence: Synthetic polypeptide
GIGRTGTFIVIDILIDIIREKGVDCDIDVPKTIQMVRSQR

SEQ ID NO: 8298 - protein, 40 aa, Artificial Sequence
  Description of Artificial Sequence: Synthetic polypeptide
IGRTGTFIVIDILIDIIREKGVDCDIDVPKTIQMVRSQRS

SEQ ID NO: 8299 - protein, 40 aa, Artificial Sequence
  Description of Artificial Sequence: Synthetic polypeptide
IDIIREKGVDCDIDVPKTIQMVRSQRSGMVQTEAQYRFIY

SEQ ID NO: 8300 - protein, 40 aa, Artificial Sequence
  Description of Artificial Sequence: Synthetic polypeptide
KGVDCDIDVPKTIQMVRSQRSGMVQTEAQYRFIYMAVQHY

SEQ ID NO: 8301 - protein, 40 aa, Artificial Sequence
  Description of Artificial Sequence: Synthetic polypeptide
VDCDIDVPKTIQMVRSQRSGMVQTEAQYRFIYMAVQHYIE

SEQ ID NO: 8302 - protein, 40 aa, Artificial Sequence
  Description of Artificial Sequence: Synthetic polypeptide
QRSGMVQTEAQYRFIYMAVQHYIETLQRRIEEEQKSKRKG

SEQ ID NO: 8303 - protein, 40 aa, Artificial Sequence
  Description of Artificial Sequence: Synthetic polypeptide
RFIYMAVQHYIETLQRRIEEEQKSKRKGHEYTNIKYSLAD

SEQ ID NO: 8304 - protein, 40 aa, Artificial Sequence
  Description of Artificial Sequence: Synthetic polypeptide
FIYMAVQHYIETLQRRIEEEQKSKRKGHEYTNIKYSLADQ

SEQ ID NO: 8305 - protein, 40 aa, Artificial Sequence
  Description of Artificial Sequence: Synthetic polypeptide
YMAVQHYIETLQRRIEEEQKSKRKGHEYTNIKYSLADQTS

SEQ ID NO: 8306 - protein, 40 aa, Artificial Sequence
  Description of Artificial Sequence: Synthetic polypeptide
QHYIETLQRRIEEEQKSKRKGHEYTNIKYSLADQTSGDQS

SEQ ID NO: 8307 - protein, 40 aa, Artificial Sequence
  Description of Artificial Sequence: Synthetic polypeptide
HYIETLQRRIEEEQKSKRKGHEYTNIKYSLADQTSGDQSP

SEQ ID NO: 8308 - protein, 40 aa, Artificial Sequence
  Description of Artificial Sequence: Synthetic polypeptide
YIETLQRRIEEEQKSKRKGHEYTNIKYSLADQTSGDQSPL

SEQ ID NO: 8309 - protein, 40 aa, Artificial Sequence
  Description of Artificial Sequence: Synthetic polypeptide
IETLQRRIEEEQKSKRKGHEYTNIKYSLADQTSGDQSPLP

SEQ ID NO: 8310 - protein, 40 aa, Artificial Sequence
  Description of Artificial Sequence: Synthetic polypeptide
NIKYSLADQTSGDQSPLPPCTPTPPCAEMREDSARVYENV

SEQ ID NO: 8311 - protein, 40 aa, Artificial Sequence
  Description of Artificial Sequence: Synthetic polypeptide
ARMFAENNGLLFLETSALDSTNVELAFETVLKEIFAKVSK

SEQ ID NO: 8312 - protein, 40 aa, Artificial Sequence
  Description of Artificial Sequence: Synthetic polypeptide
NGLLFLETSALDSTNVELAFETVLKEIFAKVSKQRQNSIR

SEQ ID NO: 8313 - protein, 40 aa, Artificial Sequence
  Description of Artificial Sequence: Synthetic polypeptide
GLLFLETSALDSTNVELAFETVLKEIFAKVSKQRQNSIRT

SEQ ID NO: 8314 - protein, 40 aa, Artificial Sequence
  Description of Artificial Sequence: Synthetic polypeptide
AIKCVVVGDGAVGKTCLLISYTTNAFPGEYIPTVFDNYSA

SEQ ID NO: 8315 - protein, 40 aa, Artificial Sequence
  Description of Artificial Sequence: Synthetic polypeptide
IKCVVVGDGAVGKTCLLISYTTNAFPGEYIPTVFDNYSAN

SEQ ID NO: 8316 - protein, 40 aa, Artificial Sequence
  Description of Artificial Sequence: Synthetic polypeptide
CVVVGDGAVGKTCLLISYTTNAFPGEYIPTVFDNYSANVM

SEQ ID NO: 8317 - protein, 40 aa, Artificial Sequence
  Description of Artificial Sequence: Synthetic polypeptide
VGDGAVGKTCLLISYTTNAFPGEYIPTVFDNYSANVMVDG

SEQ ID NO: 8318 - protein, 40 aa, Artificial Sequence
  Description of Artificial Sequence: Synthetic polypeptide
KTCLLISYTTNAFPGEYIPTVFDNYSANVMVDGKPVNLGL

SEQ ID NO: 8319 - protein, 40 aa, Artificial Sequence
  Description of Artificial Sequence: Synthetic polypeptide
CLLISYTTNAFPGEYIPTVFDNYSANVMVDGKPVNLGLWD

SEQ ID NO: 8320 - protein, 40 aa, Artificial Sequence
  Description of Artificial Sequence: Synthetic polypeptide
PTVFDNYSANVMVDGKPVNLGLWDTAGQEDYDRLRPLSYP

SEQ ID NO: 8321 - protein, 40 aa, Artificial Sequence
  Description of Artificial Sequence: Synthetic polypeptide
NVMVDGKPVNLGLWDTAGQEDYDRLRPLSYPQTVGETYGK

SEQ ID NO: 8322 - protein, 40 aa, Artificial Sequence
  Description of Artificial Sequence: Synthetic polypeptide
DGKPVNLGLWDTAGQEDYDRLRPLSYPQTVGETYGKDITS

SEQ ID NO: 8323 - protein, 40 aa, Artificial Sequence
  Description of Artificial Sequence: Synthetic polypeptide
GKPVNLGLWDTAGQEDYDRLRPLSYPQTVGETYGKDITSR

SEQ ID NO: 8324 - protein, 40 aa, Artificial Sequence
  Description of Artificial Sequence: Synthetic polypeptide
PVNLGLWDTAGQEDYDRLRPLSYPQTVGETYGKDITSRGK

SEQ ID NO: 8325 - protein, 40 aa, Artificial Sequence
  Description of Artificial Sequence: Synthetic polypeptide
VNLGLWDTAGQEDYDRLRPLSYPQTVGETYGKDITSRGKD

SEQ ID NO: 8326 - protein, 40 aa, Artificial Sequence
  Description of Artificial Sequence: Synthetic polypeptide
MGLWDTAGQEDYDRLRPLSYPQTVGETYGKDITSRGKDKP

SEQ ID NO: 8327 - protein, 40 aa, Artificial Sequence
  Description of Artificial Sequence: Synthetic polypeptide
GLWDTAGQEDYDRLRPLSYPQTVGETYGKDITSRGKDKPI

SEQ ID NO: 8328 - protein, 40 aa, Artificial Sequence
  Description of Artificial Sequence: Synthetic polypeptide
LWDTAGQEDYDRLRPLSYPQTVGETYGKDITSRGKDKPIA

SEQ ID NO: 8329 - protein, 40 aa, Artificial Sequence
  Description of Artificial Sequence: Synthetic polypeptide
AGQEDYDRLRPLSYPQTVGETYGKDITSRGKDKPIADVFL

SEQ ID NO: 8330 - protein, 40 aa, Artificial Sequence
  Description of Artificial Sequence: Synthetic polypeptide
QEDYDRLRPLSYPQTVGETYGKDITSRGKDKPIADVFLIC

SEQ ID NO: 8331 - protein, 40 aa, Artificial Sequence
  Description of Artificial Sequence: Synthetic polypeptide
RLRPLSYPQTVGETYGKDITSRGKDKPIADVFLICFSLVS

SEQ ID NO: 8332 - protein, 40 aa, Artificial Sequence
  Description of Artificial Sequence: Synthetic polypeptide
PQTVGETYGKDITSRGKDKPIADVFLICFSLVSPASFENV

SEQ ID NO: 8333 - protein, 40 aa, Artificial Sequence
  Description of Artificial Sequence: Synthetic polypeptide
QTVGETYGKDITSRGKDKPIADVFLICFSLVSPASFENVR

SEQ ID NO: 8334 - protein, 40 aa, Artificial Sequence
  Description of Artificial Sequence: Synthetic polypeptide
ETYGKDITSRGKDKPIADVFLICFSLVSPASFENVRAKWY

SEQ ID NO: 8335 - protein, 40 aa, Artificial Sequence
  Description of Artificial Sequence: Synthetic polypeptide
YGKDITSRGKDKPIADVFLICFSLVSPASFENVRAKWYPE

SEQ ID NO: 8336 - protein, 40 aa, Artificial Sequence
  Description of Artificial Sequence: Synthetic polypeptide
RGKDKPIADVFLICFSLVSPASFENVRAKWYPEVRHHCPN

SEQ ID NO: 8337 - protein, 40 aa, Artificial Sequence
  Description of Artificial Sequence: Synthetic polypeptide
DKPIADVFLICFSLVSPASFENVRAKWYPEVRHHCPNTPI

SEQ ID NO: 8338 - protein, 40 aa, Artificial Sequence
  Description of Artificial Sequence: Synthetic polypeptide
KLDLRDDKDTIEKLKEKKLTPITYPQGLAMAKEIGAVKYL

SEQ ID NO: 8339 - protein, 40 aa, Artificial Sequence
  Description of Artificial Sequence: Synthetic polypeptide
PQGLAMAKEIGAVKYLECSALTQRGLKTVFDEAIRAVLCP

SEQ ID NO: 8340 - protein, 40 aa, Artificial Sequence
  Description of Artificial Sequence: Synthetic polypeptide
DPSKTSNTIRVFLPNKQRTVVNVRNGMSLHDCLMKALKVR

SEQ ID NO: 8341 - protein, 40 aa, Artificial Sequence
  Description of Artificial Sequence: Synthetic polypeptide
RVFLPNKQRTVVNVRNGMSLHDCLMKALKVRGLQPECCAV

SEQ ID NO: 8342 - protein, 40 aa, Artificial Sequence
  Description of Artificial Sequence: Synthetic polypeptide
VVNVRNGMSLHDCLMKALKVRGLQPECCAVFRLLHEHKGK

SEQ ID NO: 8343 - protein, 40 aa, Artificial Sequence
  Description of Artificial Sequence: Synthetic polypeptide
VNVRNGMSLHDCLMKALKVRGLQPECCAVFRLLHEHKGKK

SEQ ID NO: 8344 - protein, 40 aa, Artificial Sequence
  Description of Artificial Sequence: Synthetic polypeptide
NVRNGMSLHDCLMKALKVRGLQPECCAVFRLLHEHKGKKA

SEQ ID NO: 8345 - protein, 40 aa, Artificial Sequence
  Description of Artificial Sequence: Synthetic polypeptide
RNGMSLHDCLMKALKVRGLQPECCAVFRLLHEHKGKKARL

SEQ ID NO: 8346 - protein, 40 aa, Artificial Sequence
  Description of Artificial Sequence: Synthetic polypeptide
HDCLMKALKVRGLQPECCAVFRLLHEHKGKKARLDWNTDA

SEQ ID NO: 8347 - protein, 40 aa, Artificial Sequence
  Description of Artificial Sequence: Synthetic polypeptide
DCLMKALKVRGLQPECCAVFRLLHEHKGKKARLDWNTDAA

SEQ ID NO: 8348 - protein, 40 aa, Artificial Sequence
  Description of Artificial Sequence: Synthetic polypeptide
KALKVRGLQPECCAVFRLLHEHKGKKARLDWNTDAASLIG

SEQ ID NO: 8349 - protein, 40 aa, Artificial Sequence
  Description of Artificial Sequence: Synthetic polypeptide
ALKVRGLQPECCAVFRLLHEHKGKKARLDWNTDAASLIGE

SEQ ID NO: 8350 - protein, 40 aa, Artificial Sequence
  Description of Artificial Sequence: Synthetic polypeptide
KVRGLQPECCAVFRLLHEHKGKKARLDWNTDAASLIGEEL

SEQ ID NO: 8351 - protein, 40 aa, Artificial Sequence
  Description of Artificial Sequence: Synthetic polypeptide
PECCAVFRLLHEHKGKKARLDWNTDAASLIGEELQVDFLD

SEQ ID NO: 8352 - protein, 40 aa, Artificial Sequence
  Description of Artificial Sequence: Synthetic polypeptide
EHKGKKARLDWNTDAASLIGEELQVDFLDHVPLTTHNFAR

SEQ ID NO: 8353 - protein, 40 aa, Artificial Sequence
  Description of Artificial Sequence: Synthetic polypeptide
HKGKKARLDWNTDAASLIGEELQVDFLDHVPLTTHNFARK

SEQ ID NO: 8354 - protein, 40 aa, Artificial Sequence
  Description of Artificial Sequence: Synthetic polypeptide
CVDWSNIRQLLLFPNSTIGDSGVPALPSLTMRRMRESVSR

SEQ ID NO: 8355 - protein, 40 aa, Artificial Sequence
  Description of Artificial Sequence: Synthetic polypeptide
LLLFPNSTIGDSGVPALPSLTMRRMRESVSRMPVSSQHRY

SEQ ID NO: 8356 - protein, 40 aa, Artificial Sequence
  Description of Artificial Sequence: Synthetic polypeptide
LLFPNSTIGDSGVPALPSLTMRRMRESVSRMPVSSQHRYS

SEQ ID NO: 8357 - protein, 40 aa, Artificial Sequence
  Description of Artificial Sequence: Synthetic polypeptide
GDSGVPALPSLTMRRMRESVSRMPVSSQHRYSTPHAFTFN

SEQ ID NO: 8358 - protein, 40 aa, Artificial Sequence
  Description of Artificial Sequence: Synthetic polypeptide
ALPSLTMRRMRESVSRMPVSSQHRYSTPHAFTFNTSSPSS

SEQ ID NO: 8359 - protein, 40 aa, Artificial Sequence
  Description of Artificial Sequence: Synthetic polypeptide
LPSLTMRRMRESVSRMPVSSQHRYSTPHAFTFNTSSPSSE

SEQ ID NO: 8360 - protein, 40 aa, Artificial Sequence
  Description of Artificial Sequence: Synthetic polypeptide
SLTMRRMRESVSRMPVSSQHRYSTPHAFTFNTSSPSSEGS

SEQ ID NO: 8361 - protein, 40 aa, Artificial Sequence
  Description of Artificial Sequence: Synthetic polypeptide
RRMRESVSRMPVSSQHRYSTPHAFTFNTSSPSSEGSLSQR

SEQ ID NO: 8362 - protein, 40 aa, Artificial Sequence
  Description of Artificial Sequence: Synthetic polypeptide
IEDAIRSHSESASPSALSSSPNNLSPTGWSQPKTPVPAQR

SEQ ID NO: 8363 - protein, 40 aa, Artificial Sequence
  Description of Artificial Sequence: Synthetic polypeptide
SALSSSPNNLSPTGWSQPKTPVPAQRERAPVSGTQEKNKI

SEQ ID NO: 8364 - protein, 40 aa, Artificial Sequence
  Description of Artificial Sequence: Synthetic polypeptide
SSPNNLSPTGWSQPKTPVPAQRERAPVSGTQEKNKIRPRG

SEQ ID NO: 8365 - protein, 40 aa, Artificial Sequence
  Description of Artificial Sequence: Synthetic polypeptide
NLSPTGWSQPKTPVPAQRERAPVSGTQEKNKIRPRGQRDS

SEQ ID NO: 8366 - protein, 40 aa, Artificial Sequence
  Description of Artificial Sequence: Synthetic polypeptide
SPTGWSQPKTPVPAQRERAPVSGTQEKNKIRPRGQRDSSY

SEQ ID NO: 8367 - protein, 40 aa, Artificial Sequence
  Description of Artificial Sequence: Synthetic polypeptide
KTPVPAQRERAPVSGTQEKNKIRPRGQRDSSYYWEIEASE

SEQ ID NO: 8368 - protein, 40 aa, Artificial Sequence
  Description of Artificial Sequence: Synthetic polypeptide
PAQRERAPVSGTQEKNKIRPRGQRDSSYYWEIEASEVMLS

SEQ ID NO: 8369 - protein, 40 aa, Artificial Sequence
  Description of Artificial Sequence: Synthetic polypeptide
AQRERAPVSGTQEKNKIRPRGQRDSSYYWEIEASEVMLST

SEQ ID NO: 8370 - protein, 40 aa, Artificial Sequence
  Description of Artificial Sequence: Synthetic polypeptide
RAPVSGTQEKNKIRPRGQRDSSYYWEIEASEVMLSTRIGS

SEQ ID NO: 8371 - protein, 40 aa, Artificial Sequence
  Description of Artificial Sequence: Synthetic polypeptide
KIRPRGQRDSSYYWEIEASEVMLSTRIGSGSFGTVYKGKW

SEQ ID NO: 8372 - protein, 40 aa, Artificial Sequence
  Description of Artificial Sequence: Synthetic polypeptide
GQRDSSYYWEIEASEVMLSTRIGSGSFGTVYKGKWHGDVA

SEQ ID NO: 8373 - protein, 40 aa, Artificial Sequence
  Description of Artificial Sequence: Synthetic polypeptide
WEIEASEVMLSTRIGSGSFGTVYKGKWHGDVAVKILKVVD

SEQ ID NO: 8374 - protein, 40 aa, Artificial Sequence
  Description of Artificial Sequence: Synthetic polypeptide
NNIFLHEGLTVKIGDFGLATVKSRWSGSQQVEQPTGSVLW

SEQ ID NO: 8375 - protein, 40 aa, Artificial Sequence
  Description of Artificial Sequence: Synthetic polypeptide
NIFLHEGLTVKIGDFGLATVKSRWSGSQQVEQPTGSVLWM

SEQ ID NO: 8376 - protein, 40 aa, Artificial Sequence
  Description of Artificial Sequence: Synthetic polypeptide
KIGDFGLATVKSRWSGSQQVEQPTGSVLWMAPEVIRMQDN

SEQ ID NO: 8377 - protein, 40 aa, Artificial Sequence
  Description of Artificial Sequence: Synthetic polypeptide
YGIVLYELMTGELPYSHINNRDQIIFMVGRGYASPDLSKL

SEQ ID NO: 8378 - protein, 40 aa, Artificial Sequence
  Description of Artificial Sequence: Synthetic polypeptide
MYELMTGELPYSHINNRDQIIFMVGRGYASPDLSKLYKNC

SEQ ID NO: 8379 - protein, 40 aa, Artificial Sequence
  Description of Artificial Sequence: Synthetic polypeptide
YELMTGELPYSHINNRDQIIFMVGRGYASPDLSKLYKNCP

SEQ ID NO: 8380 - protein, 40 aa, Artificial Sequence
  Description of Artificial Sequence: Synthetic polypeptide
ELMTGELPYSHINNRDQIIFMVGRGYASPDLSKLYKNCPK

SEQ ID NO: 8381 - protein, 40 aa, Artificial Sequence
  Description of Artificial Sequence: Synthetic polypeptide
QIIFMVGRGYASPDLSKLYKNCPKAMKRLVADCVKKVKEE

SEQ ID NO: 8382 - protein, 40 aa, Artificial Sequence
  Description of Artificial Sequence: Synthetic polypeptide
FMVGRGYASPDLSKLYKNCPKAMKRLVADCVKKVKEERPL

SEQ ID NO: 8383 - protein, 40 aa, Artificial Sequence
  Description of Artificial Sequence: Synthetic polypeptide
MVGRGYASPDLSKLYKNCPKAMKRLVADCVKKVKEERPLF

SEQ ID NO: 8384 - protein, 40 aa, Artificial Sequence
  Description of Artificial Sequence: Synthetic polypeptide
VGRGYASPDLSKLYKNCPKAMKRLVADCVKKVKEERPLFP

SEQ ID NO: 8385 - protein, 40 aa, Artificial Sequence
  Description of Artificial Sequence: Synthetic polypeptide
GRGYASPDLSKLYKNCPKAMKRLVADCVKKVKEERPLFPQ

SEQ ID NO: 8386 - protein, 40 aa, Artificial Sequence
  Description of Artificial Sequence: Synthetic polypeptide
RGYASPDLSKLYKNCPKAMKRLVADCVKKVKEERPLFPQI

SEQ ID NO: 8387 - protein, 40 aa, Artificial Sequence
  Description of Artificial Sequence: Synthetic polypeptide
GYASPDLSKLYKNCPKAMKRLVADCVKKVKEERPLFPQIL

SEQ ID NO: 8388 - protein, 40 aa, Artificial Sequence
  Description of Artificial Sequence: Synthetic polypeptide
YASPDLSKLYKNCPKAMKRLVADCVKKVKEERPLFPQILS

SEQ ID NO: 8389 - protein, 40 aa, Artificial Sequence
  Description of Artificial Sequence: Synthetic polypeptide
ASPDLSKLYKNCPKAMKRLVADCVKKVKEERPLFPQILSS

SEQ ID NO: 8390 - protein, 40 aa, Artificial Sequence
  Description of Artificial Sequence: Synthetic polypeptide
PDLSKLYKNCPKAMKRLVADCVKKVKEERPLFPQILSSIE

SEQ ID NO: 8391 - protein, 40 aa, Artificial Sequence
  Description of Artificial Sequence: Synthetic polypeptide
DLSKLYKNCPKAMKRLVADCVKKVKEERPLFPQILSSIEL

SEQ ID NO: 8392 - protein, 40 aa, Artificial Sequence
  Description of Artificial Sequence: Synthetic polypeptide
LSKLYKNCPKAMKRLVADCVKKVKEERPLFPQILSSIELL

SEQ ID NO: 8393 - protein, 40 aa, Artificial Sequence
  Description of Artificial Sequence: Synthetic polypeptide
SKLYKNCPKAMKRLVADCVKKVKEERPLFPQILSSIELLQ

SEQ ID NO: 8394 - protein, 40 aa, Artificial Sequence
  Description of Artificial Sequence: Synthetic polypeptide
KLYKNCPKAMKRLVADCVKKVKEERPLFPQILSSIELLQH

SEQ ID NO: 8395 - protein, 40 aa, Artificial Sequence
  Description of Artificial Sequence: Synthetic polypeptide
LYKNCPKAMKRLVADCVKKVKEERPLFPQILSSIELLQHS

SEQ ID NO: 8396 - protein, 40 aa, Artificial Sequence
  Description of Artificial Sequence: Synthetic polypeptide
YKNCPKAMKRLVADCVKKVKEERPLFPQILSSIELLQHSL

SEQ ID NO: 8397 - protein, 40 aa, Artificial Sequence
  Description of Artificial Sequence: Synthetic polypeptide
KAMKRLVADCVKKVKEERPLFPQILSSIELLQHSLPKINR

SEQ ID NO: 8398 - protein, 40 aa, Artificial Sequence
  Description of Artificial Sequence: Synthetic polypeptide
RLVADCVKKVKEERPLFPQILSSIELLQHSLPKINRSASE

SEQ ID NO: 8399 - protein, 40 aa, Artificial Sequence
  Description of Artificial Sequence: Synthetic polypeptide
MVADCVKKVKEERPLFPQILSSIELLQHSLPKINRSASEP

SEQ ID NO: 8400 - protein, 40 aa, Artificial Sequence
  Description of Artificial Sequence: Synthetic polypeptide
ADCVKKVKEERPLFPQILSSIELLQHSLPKINRSASEPSL

SEQ ID NO: 8401 - protein, 40 aa, Artificial Sequence
  Description of Artificial Sequence: Synthetic polypeptide
DCVKKVKEERPLFPQILSSIELLQHSLPKINRSASEPSLH

SEQ ID NO: 8402 - protein, 40 aa, Artificial Sequence
  Description of Artificial Sequence: Synthetic polypeptide
CVKKVKEERPLFPQILSSIELLQHSLPKINRSASEPSLHR

SEQ ID NO: 8403 - protein, 40 aa, Artificial Sequence
  Description of Artificial Sequence: Synthetic polypeptide
VKKVKEERPLFPQILSSIELLQHSLPKINRSASEPSLHRA

SEQ ID NO: 8404 - protein, 40 aa, Artificial Sequence
  Description of Artificial Sequence: Synthetic polypeptide
RVKIPAALPVAAAPYPGLVETGVAGTLGGGAALGSEFLGA

SEQ ID NO: 8405 - protein, 40 aa, Artificial Sequence
  Description of Artificial Sequence: Synthetic polypeptide
KIPAALPVAAAPYPGLVETGVAGTLGGGAALGSEFLGAGS

SEQ ID NO: 8406 - protein, 40 aa, Artificial Sequence
  Description of Artificial Sequence: Synthetic polypeptide
IPAALPVAAAPYPGLVETGVAGTLGGGAALGSEFLGAGSV

SEQ ID NO: 8407 - protein, 40 aa, Artificial Sequence
  Description of Artificial Sequence: Synthetic polypeptide
PAALPVAAAPYPGLVETGVAGTLGGGAALGSEFLGAGSVA

SEQ ID NO: 8408 - protein, 40 aa, Artificial Sequence
  Description of Artificial Sequence: Synthetic polypeptide
MPVAAAPYPGLVETGVAGTLGGGAALGSEFLGAGSVAGAL

SEQ ID NO: 8409 - protein, 40 aa, Artificial Sequence
  Description of Artificial Sequence: Synthetic polypeptide
MALTKLPTSLLAETLGPGGGFPPLPPPPYLPPLGAGLGTV

SEQ ID NO: 8410 - protein, 40 aa, Artificial Sequence
  Description of Artificial Sequence: Synthetic polypeptide
GDSLDGPEYEEEEVAIPLTAPPTNQWYHGKLDRTIAEERL

SEQ ID NO: 8411 - protein, 40 aa, Artificial Sequence
  Description of Artificial Sequence: Synthetic polypeptide
DSLDGPEYEEEEVAIPLTAPPTNQWYHGKLDRTIAEERLR

SEQ ID NO: 8412 - protein, 40 aa, Artificial Sequence
  Description of Artificial Sequence: Synthetic polypeptide
PEYEEEEVAIPLTAPPTNQWYHGKLDRTIAEERLRQAGKS

SEQ ID NO: 8413 - protein, 40 aa, Artificial Sequence
  Description of Artificial Sequence: Synthetic polypeptide
MTAPPTNQWYHGKLDRTIAEERLRQAGKSGSYLIRESDRR

SEQ ID NO: 8414 - protein, 40 aa, Artificial Sequence
  Description of Artificial Sequence: Synthetic polypeptide
APPTNQWYHGKLDRTIAEERLRQAGKSGSYLIRESDRRPG

SEQ ID NO: 8415 - protein, 40 aa, Artificial Sequence
  Description of Artificial Sequence: Synthetic polypeptide
PPTNQWYHGKLDRTIAEERLRQAGKSGSYLIRESDRRPGS

SEQ ID NO: 8416 - protein, 40 aa, Artificial Sequence
  Description of Artificial Sequence: Synthetic polypeptide
TNQWYHGKLDRTIAEERLRQAGKSGSYLIRESDRRPGSFV

SEQ ID NO: 8417 - protein, 40 aa, Artificial Sequence
  Description of Artificial Sequence: Synthetic polypeptide
NQWYHGKLDRTIAEERLRQAGKSGSYLIRESDRRPGSFVL

SEQ ID NO: 8418 - protein, 40 aa, Artificial Sequence
  Description of Artificial Sequence: Synthetic polypeptide
YHGKLDRTIAEERLRQAGKSGSYLIRESDRRPGSFVLSFL

SEQ ID NO: 8419 - protein, 40 aa, Artificial Sequence
  Description of Artificial Sequence: Synthetic polypeptide
GKLDRTIAEERLRQAGKSGSYLIRESDRRPGSFVLSFLSQ

SEQ ID NO: 8420 - protein, 40 aa, Artificial Sequence
  Description of Artificial Sequence: Synthetic polypeptide
KLDRTIAEERLRQAGKSGSYLIRESDRRPGSFVLSFLSQM

SEQ ID NO: 8421 - protein, 40 aa, Artificial Sequence
  Description of Artificial Sequence: Synthetic polypeptide
IAEERLRQAGKSGSYLIRESDRRPGSFVLSFLSQMNVVNH

SEQ ID NO: 8422 - protein, 40 aa, Artificial Sequence
  Description of Artificial Sequence: Synthetic polypeptide
ERLRQAGKSGSYLIRESDRRPGSFVLSFLSQMNVVNHFRI

SEQ ID NO: 8423 - protein, 40 aa, Artificial Sequence
  Description of Artificial Sequence: Synthetic polypeptide
RLRQAGKSGSYLIRESDRRPGSFVLSFLSQMNVVNHFRII

SEQ ID NO: 8424 - protein, 40 aa, Artificial Sequence
  Description of Artificial Sequence: Synthetic polypeptide
LRQAGKSGSYLIRESDRRPGSFVLSFLSQMNVVNHFRIIA

SEQ ID NO: 8425 - protein, 40 aa, Artificial Sequence
  Description of Artificial Sequence: Synthetic polypeptide
GKSGSYLIRESDRRPGSFVLSFLSQMNVVNHFRIIAMCGD

SEQ ID NO: 8426 - protein, 40 aa, Artificial Sequence
  Description of Artificial Sequence: Synthetic polypeptide
KSGSYLIRESDRRPGSFVLSFLSQMNVVNHFRIIAMCGDY

SEQ ID NO: 8427 - protein, 40 aa, Artificial Sequence
  Description of Artificial Sequence: Synthetic polypeptide
RESDRRPGSFVLSFLSQMNVVNHFRIIAMCGDYYIGGRRF

SEQ ID NO: 8428 - protein, 40 aa, Artificial Sequence
  Description of Artificial Sequence: Synthetic polypeptide
PGSFVLSFLSQMNVVNHFRIIAMCGDYYIGGRRFSSLSDL

SEQ ID NO: 8429 - protein, 40 aa, Artificial Sequence
  Description of Artificial Sequence: Synthetic polypeptide
SFVLSFLSQMNVVNHFRIIAMCGDYYIGGRRFSSLSDLIG

SEQ ID NO: 8430 - protein, 40 aa, Artificial Sequence
  Description of Artificial Sequence: Synthetic polypeptide
FVLSFLSQMNVVNHFRIIAMCGDYYIGGRRFSSLSDLIGY

SEQ ID NO: 8431 - protein, 40 aa, Artificial Sequence
  Description of Artificial Sequence: Synthetic polypeptide
LSFLSQMNVVNHFRIIAMCGDYYIGGRRFSSLSDLIGYYS

SEQ ID NO: 8432 - protein, 40 aa, Artificial Sequence
  Description of Artificial Sequence: Synthetic polypeptide
FLSQMNVVNHFRIIAMCGDYYIGGRRFSSLSDLIGYYSHV

SEQ ID NO: 8433 - protein, 40 aa, Artificial Sequence
  Description of Artificial Sequence: Synthetic polypeptide
MNVVNHFRIIAMCGDYYIGGRRFSSLSDLIGYYSHVSCLL

SEQ ID NO: 8434 - protein, 40 aa, Artificial Sequence
  Description of Artificial Sequence: Synthetic polypeptide
VNHFRIIAMCGDYYIGGRRFSSLSDLIGYYSHVSCLLKGE

SEQ ID NO: 8435 - protein, 40 aa, Artificial Sequence
  Description of Artificial Sequence: Synthetic polypeptide
NHFRIIAMCGDYYIGGRRFSSLSDLIGYYSHVSCLLKGEK

SEQ ID NO: 8436 - protein, 40 aa, Artificial Sequence
  Description of Artificial Sequence: Synthetic polypeptide
RIIAMCGDYYIGGRRFSSLSDLIGYYSHVSCLLKGEKLLY

SEQ ID NO: 8437 - protein, 40 aa, Artificial Sequence
  Description of Artificial Sequence: Synthetic polypeptide
AMCGDYYIGGRRFSSLSDLIGYYSHVSCLLKGEKLLYPVA

SEQ ID NO: 8438 - protein, 40 aa, Artificial Sequence
  Description of Artificial Sequence: Synthetic polypeptide
CGDYYIGGRRFSSLSDLIGYYSHVSCLLKGEKLLYPVAPP

SEQ ID NO: 8439 - protein, 40 aa, Artificial Sequence
  Description of Artificial Sequence: Synthetic polypeptide
GDYYIGGRRFSSLSDLIGYYSHVSCLLKGEKLLYPVAPPE

SEQ ID NO: 8440 - protein, 40 aa, Artificial Sequence
  Description of Artificial Sequence: Synthetic polypeptide
DYYIGGRRFSSLSDLIGYYSHVSCLLKGEKLLYPVAPPEP

SEQ ID NO: 8441 - protein, 40 aa, Artificial Sequence
  Description of Artificial Sequence: Synthetic polypeptide
YYIGGRRFSSLSDLIGYYSHVSCLLKGEKLLYPVAPPEPV

SEQ ID NO: 8442 - protein, 40 aa, Artificial Sequence
  Description of Artificial Sequence: Synthetic polypeptide
YIGGRRFSSLSDLIGYYSHVSCLLKGEKLLYPVAPPEPVE

SEQ ID NO: 8443 - protein, 40 aa, Artificial Sequence
  Description of Artificial Sequence: Synthetic polypeptide
IGGRRFSSLSDLIGYYSHVSCLLKGEKLLYPVAPPEPVED

SEQ ID NO: 8444 - protein, 40 aa, Artificial Sequence
  Description of Artificial Sequence: Synthetic polypeptide
GGRRFSSLSDLIGYYSHVSCLLKGEKLLYPVAPPEPVEDR

SEQ ID NO: 8445 - protein, 40 aa, Artificial Sequence
  Description of Artificial Sequence: Synthetic polypeptide
GRRFSSLSDLIGYYSHVSCLLKGEKLLYPVAPPEPVEDRR

SEQ ID NO: 8446 - protein, 40 aa, Artificial Sequence
  Description of Artificial Sequence: Synthetic polypeptide
FSSLSDLIGYYSHVSCLLKGEKLLYPVAPPEPVEDRRRVR

SEQ ID NO: 8447 - protein, 40 aa, Artificial Sequence
  Description of Artificial Sequence: Synthetic polypeptide
SDLIGYYSHVSCLLKGEKLLYPVAPPEPVEDRRRVRAILP

SEQ ID NO: 8448 - protein, 40 aa, Artificial Sequence
  Description of Artificial Sequence: Synthetic polypeptide
DLIGYYSHVSCLLKGEKLLYPVAPPEPVEDRRRVRAILPY

SEQ ID NO: 8449 - protein, 40 aa, Artificial Sequence
  Description of Artificial Sequence: Synthetic polypeptide
LIGYYSHVSCLLKGEKLLYPVAPPEPVEDRRRVRAILPYT

SEQ ID NO: 8450 - protein, 40 aa, Artificial Sequence
  Description of Artificial Sequence: Synthetic polypeptide
PVAPPEPVEDRRRVRAILPYTKVPDTDEISFLKGDMFIVH

SEQ ID NO: 8451 - protein, 40 aa, Artificial Sequence
  Description of Artificial Sequence: Synthetic polypeptide
AILPYTKVPDTDEISFLKGDMFIVHNELEDGWMWVTNLRT

SEQ ID NO: 8452 - protein, 40 aa, Artificial Sequence
  Description of Artificial Sequence: Synthetic polypeptide
KVPDTDEISFLKGDMFIVHNELEDGWMWVTNLRTDEQGLI

SEQ ID NO: 8453 - protein, 40 aa, Artificial Sequence
  Description of Artificial Sequence: Synthetic polypeptide
VPDTDEISFLKGDMFIVHNELEDGWMWVTNLRTDEQGLIV

SEQ ID NO: 8454 - protein, 40 aa, Artificial Sequence
  Description of Artificial Sequence: Synthetic polypeptide
DTDEISFLKGDMFIVHNELEDGWMWVTNLRTDEQGLIVED

SEQ ID NO: 8455 - protein, 40 aa, Artificial Sequence
  Description of Artificial Sequence: Synthetic polypeptide
TDEISFLKGDMFIVHNELEDGWMWVTNLRTDEQGLIVEDL

SEQ ID NO: 8456 - protein, 40 aa, Artificial Sequence
  Description of Artificial Sequence: Synthetic polypeptide
IVHNELEDGWMWVTNLRTDEQGLIVEDLVEEVGREEDPHE

SEQ ID NO: 8457 - protein, 40 aa, Artificial Sequence
  Description of Artificial Sequence: Synthetic polypeptide
GWMWVTNLRTDEQGLIVEDLVEEVGREEDPHEGKIWFHGK

SEQ ID NO: 8458 - protein, 40 aa, Artificial Sequence
  Description of Artificial Sequence: Synthetic polypeptide
LRTDEQGLIVEDLVEEVGREEDPHEGKIWFHGKISKQEAY

SEQ ID NO: 8459 - protein, 40 aa, Artificial Sequence
  Description of Artificial Sequence: Synthetic polypeptide
TDEQGLIVEDLVEEVGREEDPHEGKIWFHGKISKQEAYNL

SEQ ID NO: 8460 - protein, 40 aa, Artificial Sequence
  Description of Artificial Sequence: Synthetic polypeptide
DEQGLIVEDLVEEVGREEDPHEGKIWFHGKISKQEAYNLL

SEQ ID NO: 8461 - protein, 40 aa, Artificial Sequence
  Description of Artificial Sequence: Synthetic polypeptide
EQGLIVEDLVEEVGREEDPHEGKIWFHGKISKQEAYNLLM

SEQ ID NO: 8462 - protein, 40 aa, Artificial Sequence
  Description of Artificial Sequence: Synthetic polypeptide
QGLIVEDLVEEVGREEDPHEGKIWFHGKISKQEAYNLLMT

SEQ ID NO: 8463 - protein, 40 aa, Artificial Sequence
  Description of Artificial Sequence: Synthetic polypeptide
GLIVEDLVEEVGREEDPHEGKIWFHGKISKQEAYNLLMTV

SEQ ID NO: 8464 - protein, 40 aa, Artificial Sequence
  Description of Artificial Sequence: Synthetic polypeptide
LIVEDLVEEVGREEDPHEGKIWFHGKISKQEAYNLLMTVG

SEQ ID NO: 8465 - protein, 40 aa, Artificial Sequence
  Description of Artificial Sequence: Synthetic polypeptide
LVEEVGREEDPHEGKIWFHGKISKQEAYNLLMTVGQVCSF

SEQ ID NO: 8466 - protein, 40 aa, Artificial Sequence
  Description of Artificial Sequence: Synthetic polypeptide
VEEVGREEDPHEGKIWFHGKISKQEAYNLLMTVGQVCSFL

SEQ ID NO: 8467 - protein, 40 aa, Artificial Sequence
  Description of Artificial Sequence: Synthetic polypeptide
EVGREEDPHEGKIWFHGKISKQEAYNLLMTVGQVCSFLVR

SEQ ID NO: 8468 - protein, 40 aa, Artificial Sequence
  Description of Artificial Sequence: Synthetic polypeptide
VGREEDPHEGKIWFHGKISKQEAYNLLMTVGQVCSFLVRP

SEQ ID NO: 8469 - protein, 40 aa, Artificial Sequence
  Description of Artificial Sequence: Synthetic polypeptide
REEDPHEGKIWFHGKISKQEAYNLLMTVGQVCSFLVRPSD

SEQ ID NO: 8470 - protein, 40 aa, Artificial Sequence
  Description of Artificial Sequence: Synthetic polypeptide
EEDPHEGKIWFHGKISKQEAYNLLMTVGQVCSFLVRPSDN

SEQ ID NO: 8471 - protein, 40 aa, Artificial Sequence
  Description of Artificial Sequence: Synthetic polypeptide
EDPHEGKIWFHGKISKQEAYNLLMTVGQVCSFLVRPSDNT

SEQ ID NO: 8472 - protein, 40 aa, Artificial Sequence
  Description of Artificial Sequence: Synthetic polypeptide
DPHEGKIWFHGKISKQEAYNLLMTVGQVCSFLVRPSDNTP

SEQ ID NO: 8473 - protein, 40 aa, Artificial Sequence
  Description of Artificial Sequence: Synthetic polypeptide
PHEGKIWFHGKISKQEAYNLLMTVGQVCSFLVRPSDNTPG

SEQ ID NO: 8474 - protein, 40 aa, Artificial Sequence
  Description of Artificial Sequence: Synthetic polypeptide
HEGKIWFHGKISKQEAYNLLMTVGQVCSFLVRPSDNTPGD

SEQ ID NO: 8475 - protein, 40 aa, Artificial Sequence
  Description of Artificial Sequence: Synthetic polypeptide
EGKIWFHGKISKQEAYNLLMTVGQVCSFLVRPSDNTPGDY

SEQ ID NO: 8476 - protein, 40 aa, Artificial Sequence
  Description of Artificial Sequence: Synthetic polypeptide
GKIWFHGKISKQEAYNLLMTVGQVCSFLVRPSDNTPGDYS

SEQ ID NO: 8477 - protein, 40 aa, Artificial Sequence
  Description of Artificial Sequence: Synthetic polypeptide
IWFHGKISKQEAYNLLMTVGQVCSFLVRPSDNTPGDYSLY

SEQ ID NO: 8478 - protein, 40 aa, Artificial Sequence
  Description of Artificial Sequence: Synthetic polypeptide
WFHGKISKQEAYNLLMTVGQVCSFLVRPSDNTPGDYSLYF

SEQ ID NO: 8479 - protein, 40 aa, Artificial Sequence
  Description of Artificial Sequence: Synthetic polypeptide
FHGKISKQEAYNLLMTVGQVCSFLVRPSDNTPGDYSLYFR

SEQ ID NO: 8480 - protein, 40 aa, Artificial Sequence
  Description of Artificial Sequence: Synthetic polypeptide
HGKISKQEAYNLLMTVGQVCSFLVRPSDNTPGDYSLYFRT

SEQ ID NO: 8481 - protein, 40 aa, Artificial Sequence
  Description of Artificial Sequence: Synthetic polypeptide
KQEAYNLLMTVGQVCSFLVRPSDNTPGDYSLYFRTNENIQ

SEQ ID NO: 8482 - protein, 40 aa, Artificial Sequence
  Description of Artificial Sequence: Synthetic polypeptide
EAYNLLMTVGQVCSFLVRPSDNTPGDYSLYFRTNENIQRF

SEQ ID NO: 8483 - protein, 40 aa, Artificial Sequence
  Description of Artificial Sequence: Synthetic polypeptide
AYNLLMTVGQVCSFLVRPSDNTPGDYSLYFRTNENIQRFK

SEQ ID NO: 8484 - protein, 40 aa, Artificial Sequence
  Description of Artificial Sequence: Synthetic polypeptide
LMTVGQVCSFLVRPSDNTPGDYSLYFRTNENIQRFKICPT

SEQ ID NO: 8485 - protein, 40 aa, Artificial Sequence
  Description of Artificial Sequence: Synthetic polypeptide
MTVGQVCSFLVRPSDNTPGDYSLYFRTNENIQRFKICPTP

SEQ ID NO: 8486 - protein, 40 aa, Artificial Sequence
  Description of Artificial Sequence: Synthetic polypeptide
TVGQVCSFLVRPSDNTPGDYSLYFRTNENIQRFKICPTPN

SEQ ID NO: 8487 - protein, 40 aa, Artificial Sequence
  Description of Artificial Sequence: Synthetic polypeptide
QVCSFLVRPSDNTPGDYSLYFRTNENIQRFKICPTPNNQF

SEQ ID NO: 8488 - protein, 40 aa, Artificial Sequence
  Description of Artificial Sequence: Synthetic polypeptide
VCSFLVRPSDNTPGDYSLYFRTNENIQRFKICPTPNNQFM

SEQ ID NO: 8489 - protein, 40 aa, Artificial Sequence
  Description of Artificial Sequence: Synthetic polypeptide
GDYSLYFRTNENIQRFKICPTPNNQFMMGGRYYNSIGDII

SEQ ID NO: 8490 - protein, 40 aa, Artificial Sequence
  Description of Artificial Sequence: Synthetic polypeptide
NENIQRFKICPTPNNQFMMGGRYYNSIGDIIDHYRKEQIV

SEQ ID NO: 8491 - protein, 40 aa, Artificial Sequence
  Description of Artificial Sequence: Synthetic polypeptide
NIQRFKICPTPNNQFMMGGRYYNSIGDIIDHYRKEQIVEG

SEQ ID NO: 8492 - protein, 40 aa, Artificial Sequence
  Description of Artificial Sequence: Synthetic polypeptide
IQRFKICPTPNNQFMMGGRYYNSIGDIIDHYRKEQIVEGY

SEQ ID NO: 8493 - protein, 40 aa, Artificial Sequence
  Description of Artificial Sequence: Synthetic polypeptide
PTPNNQFMMGGRYYNSIGDIIDHYRKEQIVEGYYLKEPVP

SEQ ID NO: 8494 - protein, 40 aa, Artificial Sequence
  Description of Artificial Sequence: Synthetic polypeptide
PNNQFMMGGRYYNSIGDIIDHYRKEQIVEGYYLKEPVPMQ

SEQ ID NO: 8495 - protein, 40 aa, Artificial Sequence
  Description of Artificial Sequence: Synthetic polypeptide
MGGRYYNSIGDIIDHYRKEQIVEGYYLKEPVPMQDQEQVL

SEQ ID NO: 8496 - protein, 40 aa, Artificial Sequence
  Description of Artificial Sequence: Synthetic polypeptide
GGRYYNSIGDIIDHYRKEQIVEGYYLKEPVPMQDQEQVLN

SEQ ID NO: 8497 - protein, 40 aa, Artificial Sequence
  Description of Artificial Sequence: Synthetic polypeptide
RYYNSIGDIIDHYRKEQIVEGYYLKEPVPMQDQEQVLNDT

SEQ ID NO: 8498 - protein, 40 aa, Artificial Sequence
  Description of Artificial Sequence: Synthetic polypeptide
NSIGDIIDHYRKEQIVEGYYLKEPVPMQDQEQVLNDTVDG

SEQ ID NO: 8499 - protein, 40 aa, Artificial Sequence
  Description of Artificial Sequence: Synthetic polypeptide
SIGDIIDHYRKEQIVEGYYLKEPVPMQDQEQVLNDTVDGK

SEQ ID NO: 8500 - protein, 40 aa, Artificial Sequence
  Description of Artificial Sequence: Synthetic polypeptide
DIIDHYRKEQIVEGYYLKEPVPMQDQEQVLNDTVDGKEIY

SEQ ID NO: 8501 - protein, 40 aa, Artificial Sequence
  Description of Artificial Sequence: Synthetic polypeptide
IIDHYRKEQIVEGYYLKEPVPMQDQEQVLNDTVDGKEIYN

SEQ ID NO: 8502 - protein, 40 aa, Artificial Sequence
  Description of Artificial Sequence: Synthetic polypeptide
IDHYRKEQIVEGYYLKEPVPMQDQEQVLNDTVDGKEIYNT

SEQ ID NO: 8503 - protein, 40 aa, Artificial Sequence
  Description of Artificial Sequence: Synthetic polypeptide
RKEQIVEGYYLKEPVPMQDQEQVLNDTVDGKEIYNTIRRK

SEQ ID NO: 8504 - protein, 40 aa, Artificial Sequence
  Description of Artificial Sequence: Synthetic polypeptide
LNDTVDGKEIYNTIRRKTKDAFYKNIVKKGYLLKKGKGKR

SEQ ID NO: 8505 - protein, 40 aa, Artificial Sequence
  Description of Artificial Sequence: Synthetic polypeptide
DTVDGKEIYNTIRRKTKDAFYKNIVKKGYLLKKGKGKRWK

SEQ ID NO: 8506 - protein, 40 aa, Artificial Sequence
  Description of Artificial Sequence: Synthetic polypeptide
LLKKGKGKRWKNLYFILEGSDAQLIYFESEKRATKPKGLI

SEQ ID NO: 8507 - protein, 40 aa, Artificial Sequence
  Description of Artificial Sequence: Synthetic polypeptide
MKKGKGKRWKNLYFILEGSDAQLIYFESEKRATKPKGLID

SEQ ID NO: 8508 - protein, 40 aa, Artificial Sequence
  Description of Artificial Sequence: Synthetic polypeptide
KKGKGKRWKNLYFILEGSDAQLIYFESEKRATKPKGLIDL

SEQ ID NO: 8509 - protein, 40 aa, Artificial Sequence
  Description of Artificial Sequence: Synthetic polypeptide
KGKRWKNLYFILEGSDAQLIYFESEKRATKPKGLIDLSVC

SEQ ID NO: 8510 - protein, 40 aa, Artificial Sequence
  Description of Artificial Sequence: Synthetic polypeptide
KRWKNLYFILEGSDAQLIYFESEKRATKPKGLIDLSVCSV

SEQ ID NO: 8511 - protein, 40 aa, Artificial Sequence
  Description of Artificial Sequence: Synthetic polypeptide
LYFILEGSDAQLIYFESEKRATKPKGLIDLSVCSVYVVHD

SEQ ID NO: 8512 - protein, 40 aa, Artificial Sequence
  Description of Artificial Sequence: Synthetic polypeptide
ILEGSDAQLIYFESEKRATKPKGLIDLSVCSVYVVHDSLF

SEQ ID NO: 8513 - protein, 40 aa, Artificial Sequence
  Description of Artificial Sequence: Synthetic polypeptide
EGSDAQLIYFESEKRATKPKGLIDLSVCSVYVVHDSLFGR

SEQ ID NO: 8514 - protein, 40 aa, Artificial Sequence
  Description of Artificial Sequence: Synthetic polypeptide
SDAQLIYFESEKRATKPKGLIDLSVCSVYVVHDSLFGRPN

SEQ ID NO: 8515 - protein, 40 aa, Artificial Sequence
  Description of Artificial Sequence: Synthetic polypeptide
QLIYFESEKRATKPKGLIDLSVCSVYVVHDSLFGRPNCFQ

SEQ ID NO: 8516 - protein, 40 aa, Artificial Sequence
  Description of Artificial Sequence: Synthetic polypeptide
LIYFESEKRATKPKGLIDLSVCSVYVVHDSLFGRPNCFQI

SEQ ID NO: 8517 - protein, 40 aa, Artificial Sequence
  Description of Artificial Sequence: Synthetic polypeptide
YFESEKRATKPKGLIDLSVCSVYVVHDSLFGRPNCFQIVV

SEQ ID NO: 8518 - protein, 40 aa, Artificial Sequence
  Description of Artificial Sequence: Synthetic polypeptide
FESEKRATKPKGLIDLSVCSVYVVHDSLFGRPNCFQIVVQ

SEQ ID NO: 8519 - protein, 40 aa, Artificial Sequence
  Description of Artificial Sequence: Synthetic polypeptide
EKRATKPKGLIDLSVCSVYVVHDSLFGRPNCFQIVVQHFS

SEQ ID NO: 8520 - protein, 40 aa, Artificial Sequence
  Description of Artificial Sequence: Synthetic polypeptide
ATKPKGLIDLSVCSVYVVHDSLFGRPNCFQIVVQHFSEEH

SEQ ID NO: 8521 - protein, 40 aa, Artificial Sequence
  Description of Artificial Sequence: Synthetic polypeptide
TKPKGLIDLSVCSVYVVHDSLFGRPNCFQIVVQHFSEEHY

SEQ ID NO: 8522 - protein, 40 aa, Artificial Sequence
  Description of Artificial Sequence: Synthetic polypeptide
PKGLIDLSVCSVYVVHDSLFGRPNCFQIVVQHFSEEHYIF

SEQ ID NO: 8523 - protein, 40 aa, Artificial Sequence
  Description of Artificial Sequence: Synthetic polypeptide
KGLIDLSVCSVYVVHDSLFGRPNCFQIVVQHFSEEHYIFY

SEQ ID NO: 8524 - protein, 40 aa, Artificial Sequence
  Description of Artificial Sequence: Synthetic polypeptide
GLIDLSVCSVYVVHDSLFGRPNCFQIVVQHFSEEHYIFYF

SEQ ID NO: 8525 - protein, 40 aa, Artificial Sequence
  Description of Artificial Sequence: Synthetic polypeptide
LIDLSVCSVYVVHDSLFGRPNCFQIVVQHFSEEHYIFYFA

SEQ ID NO: 8526 - protein, 40 aa, Artificial Sequence
  Description of Artificial Sequence: Synthetic polypeptide
IDLSVCSVYVVHDSLFGRPNCFQIVVQHFSEEHYIFYFAG

SEQ ID NO: 8527 - protein, 40 aa, Artificial Sequence
  Description of Artificial Sequence: Synthetic polypeptide
CSVYVVHDSLFGRPNCFQIVVQHFSEEHYIFYFAGETPEQ

SEQ ID NO: 8528 - protein, 40 aa, Artificial Sequence
  Description of Artificial Sequence: Synthetic polypeptide
GRPNCFQIVVQHFSEEHYIFYFAGETPEQAEDWMKGLQAF

SEQ ID NO: 8529 - protein, 40 aa, Artificial Sequence
  Description of Artificial Sequence: Synthetic polypeptide
CFQIVVQHFSEEHYIFYFAGETPEQAEDWMKGLQAFCNLR

SEQ ID NO: 8530 - protein, 40 aa, Artificial Sequence
  Description of Artificial Sequence: Synthetic polypeptide
FSEEHYIFYFAGETPEQAEDWMKGLQAFCNLRKSSPGTSN

SEQ ID NO: 8531 - protein, 40 aa, Artificial Sequence
  Description of Artificial Sequence: Synthetic polypeptide
EEHYIFYFAGETPEQAEDWMKGLQAFCNLRKSSPGTSNKR

SEQ ID NO: 8532 - protein, 40 aa, Artificial Sequence
  Description of Artificial Sequence: Synthetic polypeptide
EHYIFYFAGETPEQAEDWMKGLQAFCNLRKSSPGTSNKRL

SEQ ID NO: 8533 - protein, 40 aa, Artificial Sequence
  Description of Artificial Sequence: Synthetic polypeptide
GETPEQAEDWMKGLQAFCNLRKSSPGTSNKRLRQVSSLVL

SEQ ID NO: 8534 - protein, 40 aa, Artificial Sequence
  Description of Artificial Sequence: Synthetic polypeptide
ETPEQAEDWMKGLQAFCNLRKSSPGTSNKRLRQVSSLVLH

SEQ ID NO: 8535 - protein, 40 aa, Artificial Sequence
  Description of Artificial Sequence: Synthetic polypeptide
TPEQAEDWMKGLQAFCNLRKSSPGTSNKRLRQVSSLVLHI

SEQ ID NO: 8536 - protein, 40 aa, Artificial Sequence
  Description of Artificial Sequence: Synthetic polypeptide
QAEDWMKGLQAFCNLRKSSPGTSNKRLRQVSSLVLHIEEA

SEQ ID NO: 8537 - protein, 40 aa, Artificial Sequence
  Description of Artificial Sequence: Synthetic polypeptide
EDWMKGLQAFCNLRKSSPGTSNKRLRQVSSLVLHIEEAHK

SEQ ID NO: 8538 - protein, 40 aa, Artificial Sequence
  Description of Artificial Sequence: Synthetic polypeptide
DWMKGLQAFCNLRKSSPGTSNKRLRQVSSLVLHIEEAHKL

SEQ ID NO: 8539 - protein, 40 aa, Artificial Sequence
  Description of Artificial Sequence: Synthetic polypeptide
KGLQAFCNLRKSSPGTSNKRLRQVSSLVLHIEEAHKLPVK

SEQ ID NO: 8540 - protein, 40 aa, Artificial Sequence
  Description of Artificial Sequence: Synthetic polypeptide
MQAFCNLRKSSPGTSNKRLRQVSSLVLHIEEAHKLPVKHF

SEQ ID NO: 8541 - protein, 40 aa, Artificial Sequence
  Description of Artificial Sequence: Synthetic polypeptide
QAFCNLRKSSPGTSNKRLRQVSSLVLHIEEAHKLPVKHFT

SEQ ID NO: 8542 - protein, 40 aa, Artificial Sequence
  Description of Artificial Sequence: Synthetic polypeptide
KSSPGTSNKRLRQVSSLVLHIEEAHKLPVKHFTNPYCNIY

SEQ ID NO: 8543 - protein, 40 aa, Artificial Sequence
  Description of Artificial Sequence: Synthetic polypeptide
PGTSNKRLRQVSSLVLHIEEAHKLPVKHFTNPYCNIYLNS

SEQ ID NO: 8544 - protein, 40 aa, Artificial Sequence
  Description of Artificial Sequence: Synthetic polypeptide
KRLRQVSSLVLHIEEAHKLPVKHFTNPYCNIYLNSVQVAK

SEQ ID NO: 8545 - protein, 40 aa, Artificial Sequence
  Description of Artificial Sequence: Synthetic polypeptide
RQVSSLVLHIEEAHKLPVKHFTNPYCNIYLNSVQVAKTHA

SEQ ID NO: 8546 - protein, 40 aa, Artificial Sequence
  Description of Artificial Sequence: Synthetic polypeptide
QVSSLVLHIEEAHKLPVKHFTNPYCNIYLNSVQVAKTHAR

SEQ ID NO: 8547 - protein, 40 aa, Artificial Sequence
  Description of Artificial Sequence: Synthetic polypeptide
VSSLVLHIEEAHKLPVKHFTNPYCNIYLNSVQVAKTHARE

SEQ ID NO: 8548 - protein, 40 aa, Artificial Sequence
  Description of Artificial Sequence: Synthetic polypeptide
SSLVLHIEEAHKLPVKHFTNPYCNIYLNSVQVAKTHAREG

SEQ ID NO: 8549 - protein, 40 aa, Artificial Sequence
  Description of Artificial Sequence: Synthetic polypeptide
SLVLHIEEAHKLPVKHFTNPYCNIYLNSVQVAKTHAREGQ

SEQ ID NO: 8550 - protein, 40 aa, Artificial Sequence
  Description of Artificial Sequence: Synthetic polypeptide
LVLHIEEAHKLPVKHFTNPYCNIYLNSVQVAKTHAREGQN

SEQ ID NO: 8551 - protein, 40 aa, Artificial Sequence
  Description of Artificial Sequence: Synthetic polypeptide
LHIEEAHKLPVKHFTNPYCNIYLNSVQVAKTHAREGQNPV

SEQ ID NO: 8552 - protein, 40 aa, Artificial Sequence
  Description of Artificial Sequence: Synthetic polypeptide
HIEEAHKLPVKHFTNPYCNIYLNSVQVAKTHAREGQNPVW

SEQ ID NO: 8553 - protein, 40 aa, Artificial Sequence
  Description of Artificial Sequence: Synthetic polypeptide
IEEAHKLPVKHFTNPYCNIYLNSVQVAKTHAREGQNPVWS

SEQ ID NO: 8554 - protein, 40 aa, Artificial Sequence
  Description of Artificial Sequence: Synthetic polypeptide
PVKHFTNPYCNIYLNSVQVAKTHAREGQNPVWSEEFVFDD

SEQ ID NO: 8555 - protein, 40 aa, Artificial Sequence
  Description of Artificial Sequence: Synthetic polypeptide
AREGQNPVWSEEFVFDDLPPDINRFEITLSNKTKKSKDPD

SEQ ID NO: 8556 - protein, 40 aa, Artificial Sequence
  Description of Artificial Sequence: Synthetic polypeptide
REGQNPVWSEEFVFDDLPPDINRFEITLSNKTKKSKDPDI

SEQ ID NO: 8557 - protein, 40 aa, Artificial Sequence
  Description of Artificial Sequence: Synthetic polypeptide
EGQNPVWSEEFVFDDLPPDINRFEITLSNKTKKSKDPDIL

SEQ ID NO: 8558 - protein, 40 aa, Artificial Sequence
  Description of Artificial Sequence: Synthetic polypeptide
NPVWSEEFVFDDLPPDINRFEITLSNKTKKSKDPDILFMR

SEQ ID NO: 8559 - protein, 40 aa, Artificial Sequence
  Description of Artificial Sequence: Synthetic polypeptide
EITLSNKTKKSKDPDILFMRCQLSRLQKGHATDEWFLLSS

SEQ ID NO: 8560 - protein, 40 aa, Artificial Sequence
  Description of Artificial Sequence: Synthetic polypeptide
ITLSNKTKKSKDPDILFMRCQLSRLQKGHATDEWFLLSSH

SEQ ID NO: 8561 - protein, 40 aa, Artificial Sequence
  Description of Artificial Sequence: Synthetic polypeptide
TLSNKTKKSKDPDILFMRCQLSRLQKGHATDEWFLLSSHI

SEQ ID NO: 8562 - protein, 40 aa, Artificial Sequence
  Description of Artificial Sequence: Synthetic polypeptide
NKTKKSKDPDILFMRCQLSRLQKGHATDEWFLLSSHIPLK

SEQ ID NO: 8563 - protein, 40 aa, Artificial Sequence
  Description of Artificial Sequence: Synthetic polypeptide
TKKSKDPDILFMRCQLSRLQKGHATDEWFLLSSHIPLKGI

SEQ ID NO: 8564 - protein, 40 aa, Artificial Sequence
  Description of Artificial Sequence: Synthetic polypeptide
SKDPDILFMRCQLSRLQKGHATDEWFLLSSHIPLKGIEPG

SEQ ID NO: 8565 - protein, 40 aa, Artificial Sequence
  Description of Artificial Sequence: Synthetic polypeptide
DPDILFMRCQLSRLQKGHATDEWFLLSSHIPLKGIEPGSL

SEQ ID NO: 8566 - protein, 40 aa, Artificial Sequence
  Description of Artificial Sequence: Synthetic polypeptide
DILFMRCQLSRLQKGHATDEWFLLSSHIPLKGIEPGSLRV

SEQ ID NO: 8567 - protein, 40 aa, Artificial Sequence
  Description of Artificial Sequence: Synthetic polypeptide
ILFMRCQLSRLQKGHATDEWFLLSSHIPLKGIEPGSLRVR

SEQ ID NO: 8568 - protein, 40 aa, Artificial Sequence
  Description of Artificial Sequence: Synthetic polypeptide
LFMRCQLSRLQKGHATDEWFLLSSHIPLKGIEPGSLRVRA

SEQ ID NO: 8569 - protein, 40 aa, Artificial Sequence
  Description of Artificial Sequence: Synthetic polypeptide
QLSRLQKGHATDEWFLLSSHIPLKGIEPGSLRVRARYSME

SEQ ID NO: 8570 - protein, 40 aa, Artificial Sequence
  Description of Artificial Sequence: Synthetic polypeptide
LQKGHATDEWFLLSSHIPLKGIEPGSLRVRARYSMEKIMP

SEQ ID NO: 8571 - protein, 40 aa, Artificial Sequence
  Description of Artificial Sequence: Synthetic polypeptide
LSSHIPLKGIEPGSLRVRARYSMEKIMPEEEYSEFKELIL

SEQ ID NO: 8572 - protein, 40 aa, Artificial Sequence
  Description of Artificial Sequence: Synthetic polypeptide
SHIPLKGIEPGSLRVRARYSMEKIMPEEEYSEFKELILQK

SEQ ID NO: 8573 - protein, 40 aa, Artificial Sequence
  Description of Artificial Sequence: Synthetic polypeptide
IPLKGIEPGSLRVRARYSMEKIMPEEEYSEFKELILQKEL

SEQ ID NO: 8574 - protein, 40 aa, Artificial Sequence
  Description of Artificial Sequence: Synthetic polypeptide
PLKGIEPGSLRVRARYSMEKIMPEEEYSEFKELILQKELH

SEQ ID NO: 8575 - protein, 40 aa, Artificial Sequence
  Description of Artificial Sequence: Synthetic polypeptide
IEPGSLRVRARYSMEKIMPEEEYSEFKELILQKELHVVYA

SEQ ID NO: 8576 - protein, 40 aa, Artificial Sequence
  Description of Artificial Sequence: Synthetic polypeptide
PGSLRVRARYSMEKIMPEEEYSEFKELILQKELHVVYALS

SEQ ID NO: 8577 - protein, 40 aa, Artificial Sequence
  Description of Artificial Sequence: Synthetic polypeptide
GSLRVRARYSMEKIMPEEEYSEFKELILQKELHVVYALSH

SEQ ID NO: 8578 - protein, 40 aa, Artificial Sequence
  Description of Artificial Sequence: Synthetic polypeptide
RYSMEKIMPEEEYSEFKELILQKELHVVYALSHVCGQDRT

SEQ ID NO: 8579 - protein, 40 aa, Artificial Sequence
  Description of Artificial Sequence: Synthetic polypeptide
PEEEYSEFKELILQKELHVVYALSHVCGQDRTLLASILLR

SEQ ID NO: 8580 - protein, 40 aa, Artificial Sequence
  Description of Artificial Sequence: Synthetic polypeptide
YALSHVCGQDRTLLASILLRIFLHEKLESLLLCTLNDREI

SEQ ID NO: 8581 - protein, 40 aa, Artificial Sequence
  Description of Artificial Sequence: Synthetic polypeptide
DRTLLASILLRIFLHEKLESLLLCTLNDREISMEDEATTL

SEQ ID NO: 8582 - protein, 40 aa, Artificial Sequence
  Description of Artificial Sequence: Synthetic polypeptide
LFRATTLASTLMEQYMKATATQFVHHALKDSILKIMESKQ

SEQ ID NO: 8583 - protein, 40 aa, Artificial Sequence
  Description of Artificial Sequence: Synthetic polypeptide
TLASTLMEQYMKATATQFVHHALKDSILKIMESKQSCELS

SEQ ID NO: 8584 - protein, 40 aa, Artificial Sequence
  Description of Artificial Sequence: Synthetic polypeptide
EQYMKATATQFVHHALKDSILKIMESKQSCELSPSKLEKN

SEQ ID NO: 8585 - protein, 40 aa, Artificial Sequence
  Description of Artificial Sequence: Synthetic polypeptide
YMKATATQFVHHALKDSILKIMESKQSCELSPSKLEKNED

SEQ ID NO: 8586 - protein, 40 aa, Artificial Sequence
  Description of Artificial Sequence: Synthetic polypeptide
TATQFVHHALKDSILKIMESKQSCELSPSKLEKNEDVNTN

SEQ ID NO: 8587 - protein, 40 aa, Artificial Sequence
  Description of Artificial Sequence: Synthetic polypeptide
ATQFVHHALKDSILKIMESKQSCELSPSKLEKNEDVNTNL

SEQ ID NO: 8588 - protein, 40 aa, Artificial Sequence
  Description of Artificial Sequence: Synthetic polypeptide
HHALKDSILKIMESKQSCELSPSKLEKNEDVNTNLTHLLN

SEQ ID NO: 8589 - protein, 40 aa, Artificial Sequence
  Description of Artificial Sequence: Synthetic polypeptide
HALKDSILKIMESKQSCELSPSKLEKNEDVNTNLTHLLNI

SEQ ID NO: 8590 - protein, 40 aa, Artificial Sequence
  Description of Artificial Sequence: Synthetic polypeptide
MKDSILKIMESKQSCELSPSKLEKNEDVNTNLTHLLNILS

SEQ ID NO: 8591 - protein, 40 aa, Artificial Sequence
  Description of Artificial Sequence: Synthetic polypeptide
KDSILKIMESKQSCELSPSKLEKNEDVNTNLTHLLNILSE

SEQ ID NO: 8592 - protein, 40 aa, Artificial Sequence
  Description of Artificial Sequence: Synthetic polypeptide
DSILKIMESKQSCELSPSKLEKNEDVNTNLTHLLNILSEL

SEQ ID NO: 8593 - protein, 40 aa, Artificial Sequence
  Description of Artificial Sequence: Synthetic polypeptide
LKIMESKQSCELSPSKLEKNEDVNTNLTHLLNILSELVEK

SEQ ID NO: 8594 - protein, 40 aa, Artificial Sequence
  Description of Artificial Sequence: Synthetic polypeptide
KIMESKQSCELSPSKLEKNEDVNTNLTHLLNILSELVEKI

SEQ ID NO: 8595 - protein, 40 aa, Artificial Sequence
  Description of Artificial Sequence: Synthetic polypeptide
SCELSPSKLEKNEDVNTNLTHLLNILSELVEKIFMASEIL

SEQ ID NO: 8596 - protein, 40 aa, Artificial Sequence
  Description of Artificial Sequence: Synthetic polypeptide
SKLEKNEDVNTNLTHLLNILSELVEKIFMASEILPPTLRY

SEQ ID NO: 8597 - protein, 40 aa, Artificial Sequence
  Description of Artificial Sequence: Synthetic polypeptide
KLEKNEDVNTNLTHLLNILSELVEKIFMASEILPPTLRYI

SEQ ID NO: 8598 - protein, 40 aa, Artificial Sequence
  Description of Artificial Sequence: Synthetic polypeptide
LEKNEDVNTNLTHLLNILSELVEKIFMASEILPPTLRYIY

SEQ ID NO: 8599 - protein, 40 aa, Artificial Sequence
  Description of Artificial Sequence: Synthetic polypeptide
NEDVNTNLTHLLNILSELVEKIFMASEILPPTLRYIYGCL

SEQ ID NO: 8600 - protein, 40 aa, Artificial Sequence
  Description of Artificial Sequence: Synthetic polypeptide
NLTHLLNILSELVEKIFMASEILPPTLRYIYGCLQKSVQH

SEQ ID NO: 8601 - protein, 40 aa, Artificial Sequence
  Description of Artificial Sequence: Synthetic polypeptide
HLLNILSELVEKIFMASEILPPTLRYIYGCLQKSVQHKWP

SEQ ID NO: 8602 - protein, 40 aa, Artificial Sequence
  Description of Artificial Sequence: Synthetic polypeptide
MNILSELVEKIFMASEILPPTLRYIYGCLQKSVQHKWPTN

SEQ ID NO: 8603 - protein, 40 aa, Artificial Sequence
  Description of Artificial Sequence: Synthetic polypeptide
SELVEKIFMASEILPPTLRYIYGCLQKSVQHKWPTNTTMR

SEQ ID NO: 8604 - protein, 40 aa, Artificial Sequence
  Description of Artificial Sequence: Synthetic polypeptide
LVEKIFMASEILPPTLRYIYGCLQKSVQHKWPTNTTMRTR

SEQ ID NO: 8605 - protein, 40 aa, Artificial Sequence
  Description of Artificial Sequence: Synthetic polypeptide
VEKIFMASEILPPTLRYIYGCLQKSVQHKWPTNTTMRTRV

SEQ ID NO: 8606 - protein, 40 aa, Artificial Sequence
  Description of Artificial Sequence: Synthetic polypeptide
IFMASEILPPTLRYIYGCLQKSVQHKWPTNTTMRTRVVSG

SEQ ID NO: 8607 - protein, 40 aa, Artificial Sequence
  Description of Artificial Sequence: Synthetic polypeptide
ASEILPPTLRYIYGCLQKSVQHKWPTNTTMRTRVVSGFVF

SEQ ID NO: 8608 - protein, 40 aa, Artificial Sequence
  Description of Artificial Sequence: Synthetic polypeptide
SEILPPTLRYIYGCLQKSVQHKWPTNTTMRTRVVSGFVFL

SEQ ID NO: 8609 - protein, 40 aa, Artificial Sequence
  Description of Artificial Sequence: Synthetic polypeptide
ILPPTLRYIYGCLQKSVQHKWPTNTTMRTRVVSGFVFLRL

SEQ ID NO: 8610 - protein, 40 aa, Artificial Sequence
  Description of Artificial Sequence: Synthetic polypeptide
PPTLRYIYGCLQKSVQHKWPTNTTMRTRVVSGFVFLRLIC

SEQ ID NO: 8611 - protein, 40 aa, Artificial Sequence
  Description of Artificial Sequence: Synthetic polypeptide
TLRYIYGCLQKSVQHKWPTNTTMRTRVVSGFVFLRLICPA

SEQ ID NO: 8612 - protein, 40 aa, Artificial Sequence
  Description of Artificial Sequence: Synthetic polypeptide
MRYIYGCLQKSVQHKWPTNTTMRTRVVSGFVFLRLICPAI

SEQ ID NO: 8613 - protein, 40 aa, Artificial Sequence
  Description of Artificial Sequence: Synthetic polypeptide
RYIYGCLQKSVQHKWPTNTTMRTRVVSGFVFLRLICPAIL

SEQ ID NO: 8614 - protein, 40 aa, Artificial Sequence
  Description of Artificial Sequence: Synthetic polypeptide
YIYGCLQKSVQHKWPTNTTMRTRVVSGFVFLRLICPAILN

SEQ ID NO: 8615 - protein, 40 aa, Artificial Sequence
  Description of Artificial Sequence: Synthetic polypeptide
IMFLDELGNVPELPDTTEHSRTDLSRDLAALHEICVAHSD

SEQ ID NO: 8616 - protein, 40 aa, Artificial Sequence
  Description of Artificial Sequence: Synthetic polypeptide
SRDLAALHEICVAHSDELRTLSNERGAQQHVLKKLLAITE

SEQ ID NO: 8617 - protein, 40 aa, Artificial Sequence
  Description of Artificial Sequence: Synthetic polypeptide
HEICVAHSDELRTLSNERGAQQHVLKKLLAITELLQQKQN

SEQ ID NO: 8618 - protein, 40 aa, Artificial Sequence
  Description of Artificial Sequence: Synthetic polypeptide
HSDELRTLSNERGAQQHVLKKLLAITELLQQKQNQYTKTN

SEQ ID NO: 8619 - protein, 40 aa, Artificial Sequence
  Description of Artificial Sequence: Synthetic polypeptide
SDELRTLSNERGAQQHVLKKLLAITELLQQKQNQYTKTND

SEQ ID NO: 8620 - protein, 40 aa, Artificial Sequence
  Description of Artificial Sequence: Synthetic polypeptide
ELRTLSNERGAQQHVLKKLLAITELLQQKQNQYTKTNDVR

SEQ ID NO: 8621 - protein, 40 aa, Artificial Sequence
  Description of Artificial Sequence: Synthetic polypeptide
EPPAPPPPPPPEEDPEQDSGPEDLPLVRLEFEETEEPDFT

SEQ ID NO: 8622 - protein, 40 aa, Artificial Sequence
  Description of Artificial Sequence: Synthetic polypeptide
CQKLKIPDHVRERAWLTWEKVSSVDGVLGGYIQKKKELWG

SEQ ID NO: 8623 - protein, 40 aa, Artificial Sequence
  Description of Artificial Sequence: Synthetic polypeptide
KLKIPDHVRERAWLTWEKVSSVDGVLGGYIQKKKELWGIC

SEQ ID NO: 8624 - protein, 40 aa, Artificial Sequence
  Description of Artificial Sequence: Synthetic polypeptide
LKIPDHVRERAWLTWEKVSSVDGVLGGYIQKKKELWGICI

SEQ ID NO: 8625 - protein, 40 aa, Artificial Sequence
  Description of Artificial Sequence: Synthetic polypeptide
IPDHVRERAWLTWEKVSSVDGVLGGYIQKKKELWGICIFI

SEQ ID NO: 8626 - protein, 40 aa, Artificial Sequence
  Description of Artificial Sequence: Synthetic polypeptide
PDHVRERAWLTWEKVSSVDGVLGGYIQKKKELWGICIFIA

SEQ ID NO: 8627 - protein, 40 aa, Artificial Sequence
  Description of Artificial Sequence: Synthetic polypeptide
DHVRERAWLTWEKVSSVDGVLGGYIQKKKELWGICIFIAA

SEQ ID NO: 8628 - protein, 40 aa, Artificial Sequence
  Description of Artificial Sequence: Synthetic polypeptide
VRERAWLTWEKVSSVDGVLGGYIQKKKELWGICIFIAAVD

SEQ ID NO: 8629 - protein, 40 aa, Artificial Sequence
  Description of Artificial Sequence: Synthetic polypeptide
RERAWLTWEKVSSVDGVLGGYIQKKKELWGICIFIAAVDL

SEQ ID NO: 8630 - protein, 40 aa, Artificial Sequence
  Description of Artificial Sequence: Synthetic polypeptide
RAWLTWEKVSSVDGVLGGYIQKKKELWGICIFIAAVDLDE

SEQ ID NO: 8631 - protein, 40 aa, Artificial Sequence
  Description of Artificial Sequence: Synthetic polypeptide
WLTWEKVSSVDGVLGGYIQKKKELWGICIFIAAVDLDEMS

SEQ ID NO: 8632 - protein, 40 aa, Artificial Sequence
  Description of Artificial Sequence: Synthetic polypeptide
TWEKVSSVDGVLGGYIQKKKELWGICIFIAAVDLDEMSFT

SEQ ID NO: 8633 - protein, 40 aa, Artificial Sequence
  Description of Artificial Sequence: Synthetic polypeptide
WEKVSSVDGVLGGYIQKKKELWGICIFIAAVDLDEMSFTF

SEQ ID NO: 8634 - protein, 40 aa, Artificial Sequence
  Description of Artificial Sequence: Synthetic polypeptide
EKVSSVDGVLGGYIQKKKELWGICIFIAAVDLDEMSFTFT

SEQ ID NO: 8635 - protein, 40 aa, Artificial Sequence
  Description of Artificial Sequence: Synthetic polypeptide
KVSSVDGVLGGYIQKKKELWGICIFIAAVDLDEMSFTFTE

SEQ ID NO: 8636 - protein, 40 aa, Artificial Sequence
  Description of Artificial Sequence: Synthetic polypeptide
SVDGVLGGYIQKKKELWGICIFIAAVDLDEMSFTFTELQK

SEQ ID NO: 8637 - protein, 40 aa, Artificial Sequence
  Description of Artificial Sequence: Synthetic polypeptide
QKKKELWGICIFIAAVDLDEMSFTFTELQKNIEISVHKFF

SEQ ID NO: 8638 - protein, 40 aa, Artificial Sequence
  Description of Artificial Sequence: Synthetic polypeptide
KKKELWGICIFIAAVDLDEMSFTFTELQKNIEISVHKFFN

SEQ ID NO: 8639 - protein, 40 aa, Artificial Sequence
  Description of Artificial Sequence: Synthetic polypeptide
KKELWGICIFIAAVDLDEMSFTFTELQKNIEISVHKFFNL

SEQ ID NO: 8640 - protein, 40 aa, Artificial Sequence
  Description of Artificial Sequence: Synthetic polypeptide
KELWGICIFIAAVDLDEMSFTFTELQKNIEISVHKFFNLL

SEQ ID NO: 8641 - protein, 40 aa, Artificial Sequence
  Description of Artificial Sequence: Synthetic polypeptide
MWGICIFIAAVDLDEMSFTFTELQKNIEISVHKFFNLLKE

SEQ ID NO: 8642 - protein, 40 aa, Artificial Sequence
  Description of Artificial Sequence: Synthetic polypeptide
WGICIFIAAVDLDEMSFTFTELQKNIEISVHKFFNLLKEI

SEQ ID NO: 8643 - protein, 40 aa, Artificial Sequence
  Description of Artificial Sequence: Synthetic polypeptide
GICIFIAAVDLDEMSFTFTELQKNIEISVHKFFNLLKEID

SEQ ID NO: 8644 - protein, 40 aa, Artificial Sequence
  Description of Artificial Sequence: Synthetic polypeptide
ICIFIAAVDLDEMSFTFTELQKNIEISVHKFFNLLKEIDT

SEQ ID NO: 8645 - protein, 40 aa, Artificial Sequence
  Description of Artificial Sequence: Synthetic polypeptide
FIAAVDLDEMSFTFTELQKNIEISVHKFFNLLKEIDTSTK

SEQ ID NO: 8646 - protein, 40 aa, Artificial Sequence
  Description of Artificial Sequence: Synthetic polypeptide
IAAVDLDEMSFTFTELQKNIEISVHKFFNLLKEIDTSTKV

SEQ ID NO: 8647 - protein, 40 aa, Artificial Sequence
  Description of Artificial Sequence: Synthetic polypeptide
AAVDLDEMSFTFTELQKNIEISVHKFFNLLKEIDTSTKVD

SEQ ID NO: 8648 - protein, 40 aa, Artificial Sequence
  Description of Artificial Sequence: Synthetic polypeptide
AVDLDEMSFTFTELQKNIEISVHKFFNLLKEIDTSTKVDN

SEQ ID NO: 8649 - protein, 40 aa, Artificial Sequence
  Description of Artificial Sequence: Synthetic polypeptide
DLDEMSFTFTELQKNIEISVHKFFNLLKEIDTSTKVDNAM

SEQ ID NO: 8650 - protein, 40 aa, Artificial Sequence
  Description of Artificial Sequence: Synthetic polypeptide
LDEMSFTFTELQKNIEISVHKFFNLLKEIDTSTKVDNAMS

SEQ ID NO: 8651 - protein, 40 aa, Artificial Sequence
  Description of Artificial Sequence: Synthetic polypeptide
DEMSFTFTELQKNIEISVHKFFNLLKEIDTSTKVDNAMSR

SEQ ID NO: 8652 - protein, 40 aa, Artificial Sequence
  Description of Artificial Sequence: Synthetic polypeptide
MSFTFTELQKNIEISVHKFFNLLKEIDTSTKVDNAMSRLL

SEQ ID NO: 8653 - protein, 40 aa, Artificial Sequence
  Description of Artificial Sequence: Synthetic polypeptide
SFTFTELQKNIEISVHKFFNLLKEIDTSTKVDNAMSRLLK

SEQ ID NO: 8654 - protein, 40 aa, Artificial Sequence
  Description of Artificial Sequence: Synthetic polypeptide
FTFTELQKNIEISVHKFFNLLKEIDTSTKVDNAMSRLLKK

SEQ ID NO: 8655 - protein, 40 aa, Artificial Sequence
  Description of Artificial Sequence: Synthetic polypeptide
TFTELQKNIEISVHKFFNLLKEIDTSTKVDNAMSRLLKKY

SEQ ID NO: 8656 - protein, 40 aa, Artificial Sequence
  Description of Artificial Sequence: Synthetic polypeptide
ELQKNIEISVHKFFNLLKEIDTSTKVDNAMSRLLKKYDVL

SEQ ID NO: 8657 - protein, 40 aa, Artificial Sequence
  Description of Artificial Sequence: Synthetic polypeptide
LQKNIEISVHKFFNLLKEIDTSTKVDNAMSRLLKKYDVLF

SEQ ID NO: 8658 - protein, 40 aa, Artificial Sequence
  Description of Artificial Sequence: Synthetic polypeptide
QKNIEISVHKFFNLLKEIDTSTKVDNAMSRLLKKYDVLFA

SEQ ID NO: 8659 - protein, 40 aa, Artificial Sequence
  Description of Artificial Sequence: Synthetic polypeptide
KNIEISVHKFFNLLKEIDTSTKVDNAMSRLLKKYDVLFAL

SEQ ID NO: 8660 - protein, 40 aa, Artificial Sequence
  Description of Artificial Sequence: Synthetic polypeptide
NIEISVHKFFNLLKEIDTSTKVDNAMSRLLKKYDVLFALF

SEQ ID NO: 8661 - protein, 40 aa, Artificial Sequence
  Description of Artificial Sequence: Synthetic polypeptide
IEISVHKFFNLLKEIDTSTKVDNAMSRLLKKYDVLFALFS

SEQ ID NO: 8662 - protein, 40 aa, Artificial Sequence
  Description of Artificial Sequence: Synthetic polypeptide
ISVHKFFNLLKEIDTSTKVDNAMSRLLKKYDVLFALFSKL

SEQ ID NO: 8663 - protein, 40 aa, Artificial Sequence
  Description of Artificial Sequence: Synthetic polypeptide
SVHKFFNLLKEIDTSTKVDNAMSRLLKKYDVLFALFSKLE

SEQ ID NO: 8664 - protein, 40 aa, Artificial Sequence
  Description of Artificial Sequence: Synthetic polypeptide
HKFFNLLKEIDTSTKVDNAMSRLLKKYDVLFALFSKLERT

SEQ ID NO: 8665 - protein, 40 aa, Artificial Sequence
  Description of Artificial Sequence: Synthetic polypeptide
EIDTSTKVDNAMSRLLKKYDVLFALFSKLERTCELIYLTQ

SEQ ID NO: 8666 - protein, 40 aa, Artificial Sequence
  Description of Artificial Sequence: Synthetic polypeptide
SRLLKKYDVLFALFSKLERTCELIYLTQPSSSISTEINSA

SEQ ID NO: 8667 - protein, 40 aa, Artificial Sequence
  Description of Artificial Sequence: Synthetic polypeptide
KKYDVLFALFSKLERTCELIYLTQPSSSISTEINSALVLK

SEQ ID NO: 8668 - protein, 40 aa, Artificial Sequence
  Description of Artificial Sequence: Synthetic polypeptide
YDVLFALFSKLERTCELIYLTQPSSSISTEINSALVLKVS

SEQ ID NO: 8669 - protein, 40 aa, Artificial Sequence
  Description of Artificial Sequence: Synthetic polypeptide
DVLFALFSKLERTCELIYLTQPSSSISTEINSALVLKVSW

SEQ ID NO: 8670 - protein, 40 aa, Artificial Sequence
  Description of Artificial Sequence: Synthetic polypeptide
VLFALFSKLERTCELIYLTQPSSSISTEINSALVLKVSWI

SEQ ID NO: 8671 - protein, 40 aa, Artificial Sequence
  Description of Artificial Sequence: Synthetic polypeptide
ALFSKLERTCELIYLTQPSSSISTEINSALVLKVSWITFL

SEQ ID NO: 8672 - protein, 40 aa, Artificial Sequence
  Description of Artificial Sequence: Synthetic polypeptide
FSKLERTCELIYLTQPSSSISTEINSALVLKVSWITFLLA

SEQ ID NO: 8673 - protein, 40 aa, Artificial Sequence
  Description of Artificial Sequence: Synthetic polypeptide
PSSSISTEINSALVLKVSWITFLLAKGEVLQMEDDLVISF

SEQ ID NO: 8674 - protein, 40 aa, Artificial Sequence
  Description of Artificial Sequence: Synthetic polypeptide
SSISTEINSALVLKVSWITFLLAKGEVLQMEDDLVISFQL

SEQ ID NO: 8675 - protein, 40 aa, Artificial Sequence
  Description of Artificial Sequence: Synthetic polypeptide
ISTEINSALVLKVSWITFLLAKGEVLQMEDDLVISFQLML

SEQ ID NO: 8676 - protein, 40 aa, Artificial Sequence
  Description of Artificial Sequence: Synthetic polypeptide
TEINSALVLKVSWITFLLAKGEVLQMEDDLVISFQLMLCV

SEQ ID NO: 8677 - protein, 40 aa, Artificial Sequence
  Description of Artificial Sequence: Synthetic polypeptide
INSALVLKVSWITFLLAKGEVLQMEDDLVISFQLMLCVLD

SEQ ID NO: 8678 - protein, 40 aa, Artificial Sequence
  Description of Artificial Sequence: Synthetic polypeptide
NSALVLKVSWITFLLAKGEVLQMEDDLVISFQLMLCVLDY

SEQ ID NO: 8679 - protein, 40 aa, Artificial Sequence
  Description of Artificial Sequence: Synthetic polypeptide
SALVLKVSWITFLLAKGEVLQMEDDLVISFQLMLCVLDYF

SEQ ID NO: 8680 - protein, 40 aa, Artificial Sequence
  Description of Artificial Sequence: Synthetic polypeptide
VSWITFLLAKGEVLQMEDDLVISFQLMLCVLDYFIKLSPP

SEQ ID NO: 8681 - protein, 40 aa, Artificial Sequence
  Description of Artificial Sequence: Synthetic polypeptide
SWITFLLAKGEVLQMEDDLVISFQLMLCVLDYFIKLSPPM

SEQ ID NO: 8682 - protein, 40 aa, Artificial Sequence
  Description of Artificial Sequence: Synthetic polypeptide
WITFLLAKGEVLQMEDDLVISFQLMLCVLDYFIKLSPPML

SEQ ID NO: 8683 - protein, 40 aa, Artificial Sequence
  Description of Artificial Sequence: Synthetic polypeptide
ITFLLAKGEVLQMEDDLVISFQLMLCVLDYFIKLSPPMLL

SEQ ID NO: 8684 - protein, 40 aa, Artificial Sequence
  Description of Artificial Sequence: Synthetic polypeptide
TFLLAKGEVLQMEDDLVISFQLMLCVLDYFIKLSPPMLLK

SEQ ID NO: 8685 - protein, 40 aa, Artificial Sequence
  Description of Artificial Sequence: Synthetic polypeptide
FLLAKGEVLQMEDDLVISFQLMLCVLDYFIKLSPPMLLKE

SEQ ID NO: 8686 - protein, 40 aa, Artificial Sequence
  Description of Artificial Sequence: Synthetic polypeptide
LLAKGEVLQMEDDLVISFQLMLCVLDYFIKLSPPMLLKEP

SEQ ID NO: 8687 - protein, 40 aa, Artificial Sequence
  Description of Artificial Sequence: Synthetic polypeptide
LAKGEVLQMEDDLVISFQLMLCVLDYFIKLSPPMLLKEPY

SEQ ID NO: 8688 - protein, 40 aa, Artificial Sequence
  Description of Artificial Sequence: Synthetic polypeptide
KGEVLQMEDDLVISFQLMLCVLDYFIKLSPPMLLKEPYKT

SEQ ID NO: 8689 - protein, 40 aa, Artificial Sequence
  Description of Artificial Sequence: Synthetic polypeptide
GEVLQMEDDLVISFQLMLCVLDYFIKLSPPMLLKEPYKTA

SEQ ID NO: 8690 - protein, 40 aa, Artificial Sequence
  Description of Artificial Sequence: Synthetic polypeptide
EVLQMEDDLVISFQLMLCVLDYFIKLSPPMLLKEPYKTAV

SEQ ID NO: 8691 - protein, 40 aa, Artificial Sequence
  Description of Artificial Sequence: Synthetic polypeptide
VLQMEDDLVISFQLMLCVLDYFIKLSPPMLLKEPYKTAVI

SEQ ID NO: 8692 - protein, 40 aa, Artificial Sequence
  Description of Artificial Sequence: Synthetic polypeptide
DDLVISFQLMLCVLDYFIKLSPPMLLKEPYKTAVIPINGS

SEQ ID NO: 8693 - protein, 40 aa, Artificial Sequence
  Description of Artificial Sequence: Synthetic polypeptide
MVISFQLMLCVLDYFIKLSPPMLLKEPYKTAVIPINGSPR

SEQ ID NO: 8694 - protein, 40 aa, Artificial Sequence
  Description of Artificial Sequence: Synthetic polypeptide
VISFQLMLCVLDYFIKLSPPMLLKEPYKTAVIPINGSPRT

SEQ ID NO: 8695 - protein, 40 aa, Artificial Sequence
  Description of Artificial Sequence: Synthetic polypeptide
ISFQLMLCVLDYFIKLSPPMLLKEPYKTAVIPINGSPRTP

SEQ ID NO: 8696 - protein, 40 aa, Artificial Sequence
  Description of Artificial Sequence: Synthetic polypeptide
SFQLMLCVLDYFIKLSPPMLLKEPYKTAVIPINGSPRTPR

SEQ ID NO: 8697 - protein, 40 aa, Artificial Sequence
  Description of Artificial Sequence: Synthetic polypeptide
QLMLCVLDYFIKLSPPMLLKEPYKTAVIPINGSPRTPRRG

SEQ ID NO: 8698 - protein, 40 aa, Artificial Sequence
  Description of Artificial Sequence: Synthetic polypeptide
IKLSPPMLLKEPYKTAVIPINGSPRTPRRGQNRSARIAKQ

SEQ ID NO: 8699 - protein, 40 aa, Artificial Sequence
  Description of Artificial Sequence: Synthetic polypeptide
PINGSPRTPRRGQNRSARIAKQLENDTRIIEVLCKEHECN

SEQ ID NO: 8700 - protein, 40 aa, Artificial Sequence
  Description of Artificial Sequence: Synthetic polypeptide
NGSPRTPRRGQNRSARIAKQLENDTRIIEVLCKEHECNID

SEQ ID NO: 8701 - protein, 40 aa, Artificial Sequence
  Description of Artificial Sequence: Synthetic polypeptide
SPRTPRRGQNRSARIAKQLENDTRIIEVLCKEHECNIDEV

SEQ ID NO: 8702 - protein, 40 aa, Artificial Sequence
  Description of Artificial Sequence: Synthetic polypeptide
RGQNRSARIAKQLENDTRIIEVLCKEHECNIDEVKNVYFK

SEQ ID NO: 8703 - protein, 40 aa, Artificial Sequence
  Description of Artificial Sequence: Synthetic polypeptide
GQNRSARIAKQLENDTRIIEVLCKEHECNIDEVKNVYFKN

SEQ ID NO: 8704 - protein, 40 aa, Artificial Sequence
  Description of Artificial Sequence: Synthetic polypeptide
QNRSARIAKQLENDTRIIEVLCKEHECNIDEVKNVYFKNF

SEQ ID NO: 8705 - protein, 40 aa, Artificial Sequence
  Description of Artificial Sequence: Synthetic polypeptide
YFKNFIPFMNSLGLVTSNGLPEVENLSKRYEEIYLKNKDL

SEQ ID NO: 8706 - protein, 40 aa, Artificial Sequence
  Description of Artificial Sequence: Synthetic polypeptide
FKNFIPFMNSLGLVTSNGLPEVENLSKRYEEIYLKNKDLD

SEQ ID NO: 8707 - protein, 40 aa, Artificial Sequence
  Description of Artificial Sequence: Synthetic polypeptide
KNFIPFMNSLGLVTSNGLPEVENLSKRYEEIYLKNKDLDA

SEQ ID NO: 8708 - protein, 40 aa, Artificial Sequence
  Description of Artificial Sequence: Synthetic polypeptide
NFIPFMNSLGLVTSNGLPEVENLSKRYEEIYLKNKDLDAR

SEQ ID NO: 8709 - protein, 40 aa, Artificial Sequence
  Description of Artificial Sequence: Synthetic polypeptide
FIPFMNSLGLVTSNGLPEVENLSKRYEEIYLKNKDLDARL

SEQ ID NO: 8710 - protein, 40 aa, Artificial Sequence
  Description of Artificial Sequence: Synthetic polypeptide
IPFMNSLGLVTSNGLPEVENLSKRYEEIYLKNKDLDARLF

SEQ ID NO: 8711 - protein, 40 aa, Artificial Sequence
  Description of Artificial Sequence: Synthetic polypeptide
FMNSLGLVTSNGLPEVENLSKRYEEIYLKNKDLDARLFLD

SEQ ID NO: 8712 - protein, 40 aa, Artificial Sequence
  Description of Artificial Sequence: Synthetic polypeptide
NSLGLVTSNGLPEVENLSKRYEEIYLKNKDLDARLFLDHD

SEQ ID NO: 8713 - protein, 40 aa, Artificial Sequence
  Description of Artificial Sequence: Synthetic polypeptide
LGLVTSNGLPEVENLSKRYEEIYLKNKDLDARLFLDHDKT

SEQ ID NO: 8714 - protein, 40 aa, Artificial Sequence
  Description of Artificial Sequence: Synthetic polypeptide
LKNKDLDARLFLDHDKTLQTDSIDSFETQRTPRKSNLDEE

SEQ ID NO: 8715 - protein, 40 aa, Artificial Sequence
  Description of Artificial Sequence: Synthetic polypeptide
KNKDLDARLFLDHDKTLQTDSIDSFETQRTPRKSNLDEEV

SEQ ID NO: 8716 - protein, 40 aa, Artificial Sequence
  Description of Artificial Sequence: Synthetic polypeptide
KDLDARLFLDHDKTLQTDSIDSFETQRTPRKSNLDEEVNV

SEQ ID NO: 8717 - protein, 40 aa, Artificial Sequence
  Description of Artificial Sequence: Synthetic polypeptide
DARLFLDHDKTLQTDSIDSFETQRTPRKSNLDEEVNVIPP

SEQ ID NO: 8718 - protein, 40 aa, Artificial Sequence
  Description of Artificial Sequence: Synthetic polypeptide
TLQTDSIDSFETQRTPRKSNLDEEVNVIPPHTPVRTVMNT

SEQ ID NO: 8719 - protein, 40 aa, Artificial Sequence
  Description of Artificial Sequence: Synthetic polypeptide
LQTDSIDSFETQRTPRKSNLDEEVNVIPPHTPVRTVMNTI

SEQ ID NO: 8720 - protein, 40 aa, Artificial Sequence
  Description of Artificial Sequence: Synthetic polypeptide
FETQRTPRKSNLDEEVNVIPPHTPVRTVMNTIQQLMMILN

SEQ ID NO: 8721 - protein, 40 aa, Artificial Sequence
  Description of Artificial Sequence: Synthetic polypeptide
VRTVMNTIQQLMMILNSASDQPSENLISYFNNCTVNPKES

SEQ ID NO: 8722 - protein, 40 aa, Artificial Sequence
  Description of Artificial Sequence: Synthetic polypeptide
IQQLMMILNSASDQPSENLISYFNNCTVNPKESILKRVKD

SEQ ID NO: 8723 - protein, 40 aa, Artificial Sequence
  Description of Artificial Sequence: Synthetic polypeptide
QLMMILNSASDQPSENLISYFNNCTVNPKESILKRVKDIG

SEQ ID NO: 8724 - protein, 40 aa, Artificial Sequence
  Description of Artificial Sequence: Synthetic polypeptide
MMILNSASDQPSENLISYFNNCTVNPKESILKRVKDIGYI

SEQ ID NO: 8725 - protein, 40 aa, Artificial Sequence
  Description of Artificial Sequence: Synthetic polypeptide
ILNSASDQPSENLISYFNNCTVNPKESILKRVKDIGYIFK

SEQ ID NO: 8726 - protein, 40 aa, Artificial Sequence
  Description of Artificial Sequence: Synthetic polypeptide
LNSASDQPSENLISYFNNCTVNPKESILKRVKDIGYIFKE

SEQ ID NO: 8727 - protein, 40 aa, Artificial Sequence
  Description of Artificial Sequence: Synthetic polypeptide
ASDQPSENLISYFNNCTVNPKESILKRVKDIGYIFKEKFA

SEQ ID NO: 8728 - protein, 40 aa, Artificial Sequence
  Description of Artificial Sequence: Synthetic polypeptide
DQPSENLISYFNNCTVNPKESILKRVKDIGYIFKEKFAKA

SEQ ID NO: 8729 - protein, 40 aa, Artificial Sequence
  Description of Artificial Sequence: Synthetic polypeptide
QPSENLISYFNNCTVNPKESILKRVKDIGYIFKEKFAKAV

SEQ ID NO: 8730 - protein, 40 aa, Artificial Sequence
  Description of Artificial Sequence: Synthetic polypeptide
SENLISYFNNCTVNPKESILKRVKDIGYIFKEKFAKAVGQ

SEQ ID NO: 8731 - protein, 40 aa, Artificial Sequence
  Description of Artificial Sequence: Synthetic polypeptide
ENLISYFNNCTVNPKESILKRVKDIGYIFKEKFAKAVGQG

SEQ ID NO: 8732 - protein, 40 aa, Artificial Sequence
  Description of Artificial Sequence: Synthetic polypeptide
NLISYFNNCTVNPKESILKRVKDIGYIFKEKFAKAVGQGC

SEQ ID NO: 8733 - protein, 40 aa, Artificial Sequence
  Description of Artificial Sequence: Synthetic polypeptide
MISYFNNCTVNPKESILKRVKDIGYIFKEKFAKAVGQGCV

SEQ ID NO: 8734 - protein, 40 aa, Artificial Sequence
  Description of Artificial Sequence: Synthetic polypeptide
ISYFNNCTVNPKESILKRVKDIGYIFKEKFAKAVGQGCVE

SEQ ID NO: 8735 - protein, 40 aa, Artificial Sequence
  Description of Artificial Sequence: Synthetic polypeptide
SYFNNCTVNPKESILKRVKDIGYIFKEKFAKAVGQGCVEI

SEQ ID NO: 8736 - protein, 40 aa, Artificial Sequence
  Description of Artificial Sequence: Synthetic polypeptide
YFNNCTVNPKESILKRVKDIGYIFKEKFAKAVGQGCVEIG

SEQ ID NO: 8737 - protein, 40 aa, Artificial Sequence
  Description of Artificial Sequence: Synthetic polypeptide
CTVNPKESILKRVKDIGYIFKEKFAKAVGQGCVEIGSQRY

SEQ ID NO: 8738 - protein, 40 aa, Artificial Sequence
  Description of Artificial Sequence: Synthetic polypeptide
TVNPKESILKRVKDIGYIFKEKFAKAVGQGCVEIGSQRYK

SEQ ID NO: 8739 - protein, 40 aa, Artificial Sequence
  Description of Artificial Sequence: Synthetic polypeptide
ESILKRVKDIGYIFKEKFAKAVGQGCVEIGSQRYKLGVRL

SEQ ID NO: 8740 - protein, 40 aa, Artificial Sequence
  Description of Artificial Sequence: Synthetic polypeptide
MKRVKDIGYIFKEKFAKAVGQGCVEIGSQRYKLGVRLYYR

SEQ ID NO: 8741 - protein, 40 aa, Artificial Sequence
  Description of Artificial Sequence: Synthetic polypeptide
KRVKDIGYIFKEKFAKAVGQGCVEIGSQRYKLGVRLYYRV

SEQ ID NO: 8742 - protein, 40 aa, Artificial Sequence
  Description of Artificial Sequence: Synthetic polypeptide
RVKDIGYIFKEKFAKAVGQGCVEIGSQRYKLGVRLYYRVM

SEQ ID NO: 8743 - protein, 40 aa, Artificial Sequence
  Description of Artificial Sequence: Synthetic polypeptide
VKDIGYIFKEKFAKAVGQGCVEIGSQRYKLGVRLYYRVME

SEQ ID NO: 8744 - protein, 40 aa, Artificial Sequence
  Description of Artificial Sequence: Synthetic polypeptide
KDIGYIFKEKFAKAVGQGCVEIGSQRYKLGVRLYYRVMES

SEQ ID NO: 8745 - protein, 40 aa, Artificial Sequence
  Description of Artificial Sequence: Synthetic polypeptide
GYIFKEKFAKAVGQGCVEIGSQRYKLGVRLYYRVMESMLK

SEQ ID NO: 8746 - protein, 40 aa, Artificial Sequence
  Description of Artificial Sequence: Synthetic polypeptide
QGCVEIGSQRYKLGVRLYYRVMESMLKSEEERLSIQNFSK

SEQ ID NO: 8747 - protein, 40 aa, Artificial Sequence
  Description of Artificial Sequence: Synthetic polypeptide
CVEIGSQRYKLGVRLYYRVMESMLKSEEERLSIQNFSKLL

SEQ ID NO: 8748 - protein, 40 aa, Artificial Sequence
  Description of Artificial Sequence: Synthetic polypeptide
RVMESMLKSEEERLSIQNFSKLLNDNIFHMSLLACALEVV

SEQ ID NO: 8749 - protein, 40 aa, Artificial Sequence
  Description of Artificial Sequence: Synthetic polypeptide
SEEERLSIQNFSKLLNDNIFHMSLLACALEVVMATYSRST

SEQ ID NO: 8750 - protein, 40 aa, Artificial Sequence
  Description of Artificial Sequence: Synthetic polypeptide
RLSIQNFSKLLNDNIFHMSLLACALEVVMATYSRSTSQNL

SEQ ID NO: 8751 - protein, 40 aa, Artificial Sequence
  Description of Artificial Sequence: Synthetic polypeptide
LSIQNFSKLLNDNIFHMSLLACALEVVMATYSRSTSQNLD

SEQ ID NO: 8752 - protein, 40 aa, Artificial Sequence
  Description of Artificial Sequence: Synthetic polypeptide
SIQNFSKLLNDNIFHMSLLACALEVVMATYSRSTSQNLDS

SEQ ID NO: 8753 - protein, 40 aa, Artificial Sequence
  Description of Artificial Sequence: Synthetic polypeptide
NFSKLLNDNIFHMSLLACALEVVMATYSRSTSQNLDSGTD

SEQ ID NO: 8754 - protein, 40 aa, Artificial Sequence
  Description of Artificial Sequence: Synthetic polypeptide
SKLLNDNIFHMSLLACALEVVMATYSRSTSQNLDSGTDLS

SEQ ID NO: 8755 - protein, 40 aa, Artificial Sequence
  Description of Artificial Sequence: Synthetic polypeptide
KLLNDNIFHMSLLACALEVVMATYSRSTSQNLDSGTDLSF

SEQ ID NO: 8756 - protein, 40 aa, Artificial Sequence
  Description of Artificial Sequence: Synthetic polypeptide
LLNDNIFHMSLLACALEVVMATYSRSTSQNLDSGTDLSFP

SEQ ID NO: 8757 - protein, 40 aa, Artificial Sequence
  Description of Artificial Sequence: Synthetic polypeptide
NIFHMSLLACALEVVMATYSRSTSQNLDSGTDLSFPWILN

SEQ ID NO: 8758 - protein, 40 aa, Artificial Sequence
  Description of Artificial Sequence: Synthetic polypeptide
FHMSLLACALEVVMATYSRSTSQNLDSGTDLSFPWILNVL

SEQ ID NO: 8759 - protein, 40 aa, Artificial Sequence
  Description of Artificial Sequence: Synthetic polypeptide
HMSLLACALEVVMATYSRSTSQNLDSGTDLSFPWILNVLN

SEQ ID NO: 8760 - protein, 40 aa, Artificial Sequence
  Description of Artificial Sequence: Synthetic polypeptide
MACALEVVMATYSRSTSQNLDSGTDLSFPWILNVLNLKAF

SEQ ID NO: 8761 - protein, 40 aa, Artificial Sequence
  Description of Artificial Sequence: Synthetic polypeptide
ACALEVVMATYSRSTSQNLDSGTDLSFPWILNVLNLKAFD

SEQ ID NO: 8762 - protein, 40 aa, Artificial Sequence
  Description of Artificial Sequence: Synthetic polypeptide
ALEVVMATYSRSTSQNLDSGTDLSFPWILNVLNLKAFDFY

SEQ ID NO: 8763 - protein, 40 aa, Artificial Sequence
  Description of Artificial Sequence: Synthetic polypeptide
EVVMATYSRSTSQNLDSGTDLSFPWILNVLNLKAFDFYKV

SEQ ID NO: 8764 - protein, 40 aa, Artificial Sequence
  Description of Artificial Sequence: Synthetic polypeptide
VVMATYSRSTSQNLDSGTDLSFPWILNVLNLKAFDFYKVI

SEQ ID NO: 8765 - protein, 40 aa, Artificial Sequence
  Description of Artificial Sequence: Synthetic polypeptide
VMATYSRSTSQNLDSGTDLSFPWILNVLNLKAFDFYKVIE

SEQ ID NO: 8766 - protein, 40 aa, Artificial Sequence
  Description of Artificial Sequence: Synthetic polypeptide
MATYSRSTSQNLDSGTDLSFPWILNVLNLKAFDFYKVIES

SEQ ID NO: 8767 - protein, 40 aa, Artificial Sequence
  Description of Artificial Sequence: Synthetic polypeptide
TYSRSTSQNLDSGTDLSFPWILNVLNLKAFDFYKVIESFI

SEQ ID NO: 8768 - protein, 40 aa, Artificial Sequence
  Description of Artificial Sequence: Synthetic polypeptide
YSRSTSQNLDSGTDLSFPWILNVLNLKAFDFYKVIESFIK

SEQ ID NO: 8769 - protein, 40 aa, Artificial Sequence
  Description of Artificial Sequence: Synthetic polypeptide
SRSTSQNLDSGTDLSFPWILNVLNLKAFDFYKVIESFIKA

SEQ ID NO: 8770 - protein, 40 aa, Artificial Sequence
  Description of Artificial Sequence: Synthetic polypeptide
SQNLDSGTDLSFPWILNVLNLKAFDFYKVIESFIKAEGNL

SEQ ID NO: 8771 - protein, 40 aa, Artificial Sequence
  Description of Artificial Sequence: Synthetic polypeptide
QNLDSGTDLSFPWILNVLNLKAFDFYKVIESFIKAEGNLT

SEQ ID NO: 8772 - protein, 40 aa, Artificial Sequence
  Description of Artificial Sequence: Synthetic polypeptide
LDSGTDLSFPWILNVLNLKAFDFYKVIESFIKAEGNLTRE

SEQ ID NO: 8773 - protein, 40 aa, Artificial Sequence
  Description of Artificial Sequence: Synthetic polypeptide
DSGTDLSFPWILNVLNLKAFDFYKVIESFIKAEGNLTREM

SEQ ID NO: 8774 - protein, 40 aa, Artificial Sequence
  Description of Artificial Sequence: Synthetic polypeptide
SGTDLSFPWILNVLNLKAFDFYKVIESFIKAEGNLTREMI

SEQ ID NO: 8775 - protein, 40 aa, Artificial Sequence
  Description of Artificial Sequence: Synthetic polypeptide
GTDLSFPWILNVLNLKAFDFYKVIESFIKAEGNLTREMIK

SEQ ID NO: 8776 - protein, 40 aa, Artificial Sequence
  Description of Artificial Sequence: Synthetic polypeptide
LKAFDFYKVIESFIKAEGNLTREMIKHLERCEHRIMESLA

SEQ ID NO: 8777 - protein, 40 aa, Artificial Sequence
  Description of Artificial Sequence: Synthetic polypeptide
KAFDFYKVIESFIKAEGNLTREMIKHLERCEHRIMESLAW

SEQ ID NO: 8778 - protein, 40 aa, Artificial Sequence
  Description of Artificial Sequence: Synthetic polypeptide
NLTREMIKHLERCEHRIMESLAWLSDSPLFDLIKQSKDRE

SEQ ID NO: 8779 - protein, 40 aa, Artificial Sequence
  Description of Artificial Sequence: Synthetic polypeptide
ESLAWLSDSPLFDLIKQSKDREGPTDHLESACPLNLPLQN

SEQ ID NO: 8780 - protein, 40 aa, Artificial Sequence
  Description of Artificial Sequence: Synthetic polypeptide
LAWLSDSPLFDLIKQSKDREGPTDHLESACPLNLPLQNNH

SEQ ID NO: 8781 - protein, 40 aa, Artificial Sequence
  Description of Artificial Sequence: Synthetic polypeptide
HLESACPLNLPLQNNHTAADMYLSPVRSPKKKGSTTRVNS

SEQ ID NO: 8782 - protein, 40 aa, Artificial Sequence
  Description of Artificial Sequence: Synthetic polypeptide
LESACPLNLPLQNNHTAADMYLSPVRSPKKKGSTTRVNST

SEQ ID NO: 8783 - protein, 40 aa, Artificial Sequence
  Description of Artificial Sequence: Synthetic polypeptide
ESACPLNLPLQNNHTAADMYLSPVRSPKKKGSTTRVNSTA

SEQ ID NO: 8784 - protein, 40 aa, Artificial Sequence
  Description of Artificial Sequence: Synthetic polypeptide
SACPLNLPLQNNHTAADMYLSPVRSPKKKGSTTRVNSTAN

SEQ ID NO: 8785 - protein, 40 aa, Artificial Sequence
  Description of Artificial Sequence: Synthetic polypeptide
AADMYLSPVRSPKKKGSTTRVNSTANAETQATSAFQTQKP

SEQ ID NO: 8786 - protein, 40 aa, Artificial Sequence
  Description of Artificial Sequence: Synthetic polypeptide
DMYLSPVRSPKKKGSTTRVNSTANAETQATSAFQTQKPLK

SEQ ID NO: 8787 - protein, 40 aa, Artificial Sequence
  Description of Artificial Sequence: Synthetic polypeptide
MYLSPVRSPKKKGSTTRVNSTANAETQATSAFQTQKPLKS

SEQ ID NO: 8788 - protein, 40 aa, Artificial Sequence
  Description of Artificial Sequence: Synthetic polypeptide
SPVRSPKKKGSTTRVNSTANAETQATSAFQTQKPLKSTSL

SEQ ID NO: 8789 - protein, 40 aa, Artificial Sequence
  Description of Artificial Sequence: Synthetic polypeptide
VRSPKKKGSTTRVNSTANAETQATSAFQTQKPLKSTSLSL

SEQ ID NO: 8790 - protein, 40 aa, Artificial Sequence
  Description of Artificial Sequence: Synthetic polypeptide
RSPKKKGSTTRVNSTANAETQATSAFQTQKPLKSTSLSLF

SEQ ID NO: 8791 - protein, 40 aa, Artificial Sequence
  Description of Artificial Sequence: Synthetic polypeptide
PKKKGSTTRVNSTANAETQATSAFQTQKPLKSTSLSLFYK

SEQ ID NO: 8792 - protein, 40 aa, Artificial Sequence
  Description of Artificial Sequence: Synthetic polypeptide
KKKGSTTRVNSTANAETQATSAFQTQKPLKSTSLSLFYKK

SEQ ID NO: 8793 - protein, 40 aa, Artificial Sequence
  Description of Artificial Sequence: Synthetic polypeptide
KKGSTTRVNSTANAETQATSAFQTQKPLKSTSLSLFYKKV

SEQ ID NO: 8794 - protein, 40 aa, Artificial Sequence
  Description of Artificial Sequence: Synthetic polypeptide
STTRVNSTANAETQATSAFQTQKPLKSTSLSLFYKKVYRL

SEQ ID NO: 8795 - protein, 40 aa, Artificial Sequence
  Description of Artificial Sequence: Synthetic polypeptide
TTRVNSTANAETQATSAFQTQKPLKSTSLSLFYKKVYRLA

SEQ ID NO: 8796 - protein, 40 aa, Artificial Sequence
  Description of Artificial Sequence: Synthetic polypeptide
TRVNSTANAETQATSAFQTQKPLKSTSLSLFYKKVYRLAY

SEQ ID NO: 8797 - protein, 40 aa, Artificial Sequence
  Description of Artificial Sequence: Synthetic polypeptide
RVNSTANAETQATSAFQTQKPLKSTSLSLFYKKVYRLAYL

SEQ ID NO: 8798 - protein, 40 aa, Artificial Sequence
  Description of Artificial Sequence: Synthetic polypeptide
VNSTANAETQATSAFQTQKPLKSTSLSLFYKKVYRLAYLR

SEQ ID NO: 8799 - protein, 40 aa, Artificial Sequence
  Description of Artificial Sequence: Synthetic polypeptide
TQATSAFQTQKPLKSTSLSLFYKKVYRLAYLRLNTLCERL

SEQ ID NO: 8800 - protein, 40 aa, Artificial Sequence
  Description of Artificial Sequence: Synthetic polypeptide
AFQTQKPLKSTSLSLFYKKVYRLAYLRLNTLCERLLSEHP

SEQ ID NO: 8801 - protein, 40 aa, Artificial Sequence
  Description of Artificial Sequence: Synthetic polypeptide
TQKPLKSTSLSLFYKKVYRLAYLRLNTLCERLLSEHPELE

SEQ ID NO: 8802 - protein, 40 aa, Artificial Sequence
  Description of Artificial Sequence: Synthetic polypeptide
MKSTSLSLFYKKVYRLAYLRLNTLCERLLSEHPELEHIIW

SEQ ID NO: 8803 - protein, 40 aa, Artificial Sequence
  Description of Artificial Sequence: Synthetic polypeptide
KSTSLSLFYKKVYRLAYLRLNTLCERLLSEHPELEHIIWT

SEQ ID NO: 8804 - protein, 40 aa, Artificial Sequence
  Description of Artificial Sequence: Synthetic polypeptide
STSLSLFYKKVYRLAYLRLNTLCERLLSEHPELEHIIWTL

SEQ ID NO: 8805 - protein, 40 aa, Artificial Sequence
  Description of Artificial Sequence: Synthetic polypeptide
NTLCERLLSEHPELEHIIWTLFQHTLQNEYELMRDRHLDQ

SEQ ID NO: 8806 - protein, 40 aa, Artificial Sequence
  Description of Artificial Sequence: Synthetic polypeptide
QHTLQNEYELMRDRHLDQIMMCSMYGICKVKNIDLKFKII

SEQ ID NO: 8807 - protein, 40 aa, Artificial Sequence
  Description of Artificial Sequence: Synthetic polypeptide
YELMRDRHLDQIMMCSMYGICKVKNIDLKFKIIVTAYKDL

SEQ ID NO: 8808 - protein, 40 aa, Artificial Sequence
  Description of Artificial Sequence: Synthetic polypeptide
TAYKDLPHAVQETFKRVLIKEEEYDSIIVFYNSVFMQRLK

SEQ ID NO: 8809 - protein, 40 aa, Artificial Sequence
  Description of Artificial Sequence: Synthetic polypeptide
AYKDLPHAVQETFKRVLIKEEEYDSIIVFYNSVFMQRLKT

SEQ ID NO: 8810 - protein, 40 aa, Artificial Sequence
  Description of Artificial Sequence: Synthetic polypeptide
QETFKRVLIKEEEYDSIIVFYNSVFMQRLKTNILQYASTR

SEQ ID NO: 8811 - protein, 40 aa, Artificial Sequence
  Description of Artificial Sequence: Synthetic polypeptide
TFKRVLIKEEEYDSIIVFYNSVFMQRLKTNILQYASTRPP

SEQ ID NO: 8812 - protein, 40 aa, Artificial Sequence
  Description of Artificial Sequence: Synthetic polypeptide
YDSIIVFYNSVFMQRLKTNILQYASTRPPTLSPIPHIPRS

SEQ ID NO: 8813 - protein, 40 aa, Artificial Sequence
  Description of Artificial Sequence: Synthetic polypeptide
DSIIVFYNSVFMQRLKTNILQYASTRPPTLSPIPHIPRSP

SEQ ID NO: 8814 - protein, 40 aa, Artificial Sequence
  Description of Artificial Sequence: Synthetic polypeptide
VFYNSVFMQRLKTNILQYASTRPPTLSPIPHIPRSPYKFP

SEQ ID NO: 8815 - protein, 40 aa, Artificial Sequence
  Description of Artificial Sequence: Synthetic polypeptide
NILQYASTRPPTLSPIPHIPRSPYKFPSSPLRIPGGNIYI

SEQ ID NO: 8816 - protein, 40 aa, Artificial Sequence
  Description of Artificial Sequence: Synthetic polypeptide
ILQYASTRPPTLSPIPHIPRSPYKFPSSPLRIPGGNIYIS

SEQ ID NO: 8817 - protein, 40 aa, Artificial Sequence
  Description of Artificial Sequence: Synthetic polypeptide
QYASTRPPTLSPIPHIPRSPYKFPSSPLRIPGGNIYISPL

SEQ ID NO: 8818 - protein, 40 aa, Artificial Sequence
  Description of Artificial Sequence: Synthetic polypeptide
STRPPTLSPIPHIPRSPYKFPSSPLRIPGGNIYISPLKSP

SEQ ID NO: 8819 - protein, 40 aa, Artificial Sequence
  Description of Artificial Sequence: Synthetic polypeptide
RPPTLSPIPHIPRSPYKFPSSPLRIPGGNIYISPLKSPYK

SEQ ID NO: 8820 - protein, 40 aa, Artificial Sequence
  Description of Artificial Sequence: Synthetic polypeptide
PPTLSPIPHIPRSPYKFPSSPLRIPGGNIYISPLKSPYKI

SEQ ID NO: 8821 - protein, 40 aa, Artificial Sequence
  Description of Artificial Sequence: Synthetic polypeptide
PTLSPIPHIPRSPYKFPSSPLRIPGGNIYISPLKSPYKIS

SEQ ID NO: 8822 - protein, 40 aa, Artificial Sequence
  Description of Artificial Sequence: Synthetic polypeptide
TLSPIPHIPRSPYKFPSSPLRIPGGNIYISPLKSPYKISE

SEQ ID NO: 8823 - protein, 40 aa, Artificial Sequence
  Description of Artificial Sequence: Synthetic polypeptide
SPIPHIPRSPYKFPSSPLRIPGGNIYISPLKSPYKISEGL

SEQ ID NO: 8824 - protein, 40 aa, Artificial Sequence
  Description of Artificial Sequence: Synthetic polypeptide
PIPHIPRSPYKFPSSPLRIPGGNIYISPLKSPYKISEGLP

SEQ ID NO: 8825 - protein, 40 aa, Artificial Sequence
  Description of Artificial Sequence: Synthetic polypeptide
IPHIPRSPYKFPSSPLRIPGGNIYISPLKSPYKISEGLPT

SEQ ID NO: 8826 - protein, 40 aa, Artificial Sequence
  Description of Artificial Sequence: Synthetic polypeptide
PRSPYKFPSSPLRIPGGNIYISPLKSPYKISEGLPTPTKM

SEQ ID NO: 8827 - protein, 40 aa, Artificial Sequence
  Description of Artificial Sequence: Synthetic polypeptide
FPSSPLRIPGGNIYISPLKSPYKISEGLPTPTKMTPRSRI

SEQ ID NO: 8828 - protein, 40 aa, Artificial Sequence
  Description of Artificial Sequence: Synthetic polypeptide
PSSPLRIPGGNIYISPLKSPYKISEGLPTPTKMTPRSRIL

SEQ ID NO: 8829 - protein, 40 aa, Artificial Sequence
  Description of Artificial Sequence: Synthetic polypeptide
LRIPGGNIYISPLKSPYKISEGLPTPTKMTPRSRILVSIG

SEQ ID NO: 8830 - protein, 40 aa, Artificial Sequence
  Description of Artificial Sequence: Synthetic polypeptide
PLKSPYKISEGLPTPTKMTPRSRILVSIGESFGTSEKFQK

SEQ ID NO: 8831 - protein, 40 aa, Artificial Sequence
  Description of Artificial Sequence: Synthetic polypeptide
MKSPYKISEGLPTPTKMTPRSRILVSIGESFGTSEKFQKI

SEQ ID NO: 8832 - protein, 40 aa, Artificial Sequence
  Description of Artificial Sequence: Synthetic polypeptide
KSPYKISEGLPTPTKMTPRSRILVSIGESFGTSEKFQKIN

SEQ ID NO: 8833 - protein, 40 aa, Artificial Sequence
  Description of Artificial Sequence: Synthetic polypeptide
SPYKISEGLPTPTKMTPRSRILVSIGESFGTSEKFQKINQ

SEQ ID NO: 8834 - protein, 40 aa, Artificial Sequence
  Description of Artificial Sequence: Synthetic polypeptide
PYKISEGLPTPTKMTPRSRILVSIGESFGTSEKFQKINQM

SEQ ID NO: 8835 - protein, 40 aa, Artificial Sequence
  Description of Artificial Sequence: Synthetic polypeptide
ISEGLPTPTKMTPRSRILVSIGESFGTSEKFQKINQMVCN

SEQ ID NO: 8836 - protein, 40 aa, Artificial Sequence
  Description of Artificial Sequence: Synthetic polypeptide
SEGLPTPTKMTPRSRILVSIGESFGTSEKFQKINQMVCNS

SEQ ID NO: 8837 - protein, 40 aa, Artificial Sequence
  Description of Artificial Sequence: Synthetic polypeptide
EGLPTPTKMTPRSRILVSIGESFGTSEKFQKINQMVCNSD

SEQ ID NO: 8838 - protein, 40 aa, Artificial Sequence
  Description of Artificial Sequence: Synthetic polypeptide
MPTPTKMTPRSRILVSIGESFGTSEKFQKINQMVCNSDRV

SEQ ID NO: 8839 - protein, 40 aa, Artificial Sequence
  Description of Artificial Sequence: Synthetic polypeptide
KMTPRSRILVSIGESFGTSEKFQKINQMVCNSDRVLKRSA

SEQ ID NO: 8840 - protein, 40 aa, Artificial Sequence
  Description of Artificial Sequence: Synthetic polypeptide
RSRILVSIGESFGTSEKFQKINQMVCNSDRVLKRSAEGSN

SEQ ID NO: 8841 - protein, 40 aa, Artificial Sequence
  Description of Artificial Sequence: Synthetic polypeptide
ILVSIGESFGTSEKFQKINQMVCNSDRVLKRSAEGSNPPK

SEQ ID NO: 8842 - protein, 40 aa, Artificial Sequence
  Description of Artificial Sequence: Synthetic polypeptide
ESFGTSEKFQKINQMVCNSDRVLKRSAEGSNPPKPLKKLR

SEQ ID NO: 8843 - protein, 40 aa, Artificial Sequence
  Description of Artificial Sequence: Synthetic polypeptide
SFGTSEKFQKINQMVCNSDRVLKRSAEGSNPPKPLKKLRF

SEQ ID NO: 8844 - protein, 40 aa, Artificial Sequence
  Description of Artificial Sequence: Synthetic polypeptide
FGTSEKFQKINQMVCNSDRVLKRSAEGSNPPKPLKKLRFD

SEQ ID NO: 8845 - protein, 40 aa, Artificial Sequence
  Description of Artificial Sequence: Synthetic polypeptide
GTSEKFQKINQMVCNSDRVLKRSAEGSNPPKPLKKLRFDI

SEQ ID NO: 8846 - protein, 40 aa, Artificial Sequence
  Description of Artificial Sequence: Synthetic polypeptide
TSEKFQKINQMVCNSDRVLKRSAEGSNPPKPLKKLRFDIE

SEQ ID NO: 8847 - protein, 40 aa, Artificial Sequence
  Description of Artificial Sequence: Synthetic polypeptide
EKFQKINQMVCNSDRVLKRSAEGSNPPKPLKKLRFDIEGS

SEQ ID NO: 8848 - protein, 40 aa, Artificial Sequence
  Description of Artificial Sequence: Synthetic polypeptide
KFQKINQMVCNSDRVLKRSAEGSNPPKPLKKLRFDIEGSD

SEQ ID NO: 8849 - protein, 40 aa, Artificial Sequence
  Description of Artificial Sequence: Synthetic polypeptide
FQKINQMVCNSDRVLKRSAEGSNPPKPLKKLRFDIEGSDE

SEQ ID NO: 8850 - protein, 40 aa, Artificial Sequence
  Description of Artificial Sequence: Synthetic polypeptide
QKINQMVCNSDRVLKRSAEGSNPPKPLKKLRFDIEGSDEA

SEQ ID NO: 8851 - protein, 40 aa, Artificial Sequence
  Description of Artificial Sequence: Synthetic polypeptide
KINQMVCNSDRVLKRSAEGSNPPKPLKKLRFDIEGSDEAD

SEQ ID NO: 8852 - protein, 40 aa, Artificial Sequence
  Description of Artificial Sequence: Synthetic polypeptide
NQMVCNSDRVLKRSAEGSNPPKPLKKLRFDIEGSDEADGS

SEQ ID NO: 8853 - protein, 40 aa, Artificial Sequence
  Description of Artificial Sequence: Synthetic polypeptide
VCNSDRVLKRSAEGSNPPKPLKKLRFDIEGSDEADGSKHL

SEQ ID NO: 8854 - protein, 40 aa, Artificial Sequence
  Description of Artificial Sequence: Synthetic polypeptide
SDRVLKRSAEGSNPPKPLKKLRFDIEGSDEADGSKHLPGE

SEQ ID NO: 8855 - protein, 40 aa, Artificial Sequence
  Description of Artificial Sequence: Synthetic polypeptide
KRSAEGSNPPKPLKKLRFDIEGSDEADGSKHLPGESKFQQ

SEQ ID NO: 8856 - protein, 40 aa, Artificial Sequence
  Description of Artificial Sequence: Synthetic polypeptide
AEGSNPPKPLKKLRFDIEGSDEADGSKHLPGESKFQQKLA

SEQ ID NO: 8857 - protein, 40 aa, Artificial Sequence
  Description of Artificial Sequence: Synthetic polypeptide
GSNPPKPLKKLRFDIEGSDEADGSKHLPGESKFQQKLAEM

SEQ ID NO: 8858 - protein, 40 aa, Artificial Sequence
  Description of Artificial Sequence: Synthetic polypeptide
SNPPKPLKKLRFDIEGSDEADGSKHLPGESKFQQKLAEMT

SEQ ID NO: 8859 - protein, 40 aa, Artificial Sequence
  Description of Artificial Sequence: Synthetic polypeptide
NPPKPLKKLRFDIEGSDEADGSKHLPGESKFQQKLAEMTS

SEQ ID NO: 8860 - protein, 40 aa, Artificial Sequence
  Description of Artificial Sequence: Synthetic polypeptide
KPLKKLRFDIEGSDEADGSKHLPGESKFQQKLAEMTSTRT

SEQ ID NO: 8861 - protein, 40 aa, Artificial Sequence
  Description of Artificial Sequence: Synthetic polypeptide
DGSKHLPGESKFQQKLAEMTSTRTRMQKQKMNDSMDTSNK

SEQ ID NO: 8862 - protein, 40 aa, Artificial Sequence
  Description of Artificial Sequence: Synthetic polypeptide
MTIQFVEGQFVDSYDPTIENTFTKLITVNGQEYHLQLVDT

SEQ ID NO: 8863 - protein, 40 aa, Artificial Sequence
  Description of Artificial Sequence: Synthetic polypeptide
ITVNGQEYHLQLVDTAGQDEYSIFPQTYSIDINGYILVYS

SEQ ID NO: 8864 - protein, 40 aa, Artificial Sequence
  Description of Artificial Sequence: Synthetic polypeptide
YHLQLVDTAGQDEYSIFPQTYSIDINGYILVYSVTSIKSF

SEQ ID NO: 8865 - protein, 40 aa, Artificial Sequence
  Description of Artificial Sequence: Synthetic polypeptide
VDTAGQDEYSIFPQTYSIDINGYILVYSVTSIKSFEVIKV

SEQ ID NO: 8866 - protein, 40 aa, Artificial Sequence
  Description of Artificial Sequence: Synthetic polypeptide
DTAGQDEYSIFPQTYSIDINGYILVYSVTSIKSFEVIKVI

SEQ ID NO: 8867 - protein, 40 aa, Artificial Sequence
  Description of Artificial Sequence: Synthetic polypeptide
AGQDEYSIFPQTYSIDINGYILVYSVTSIKSFEVIKVIHG

SEQ ID NO: 8868 - protein, 40 aa, Artificial Sequence
  Description of Artificial Sequence: Synthetic polypeptide
GQDEYSIFPQTYSIDINGYILVYSVTSIKSFEVIKVIHGK

SEQ ID NO: 8869 - protein, 40 aa, Artificial Sequence
  Description of Artificial Sequence: Synthetic polypeptide
EYSIFPQTYSIDINGYILVYSVTSIKSFEVIKVIHGKLLD

SEQ ID NO: 8870 - protein, 40 aa, Artificial Sequence
  Description of Artificial Sequence: Synthetic polypeptide
SIFPQTYSIDINGYILVYSVTSIKSFEVIKVIHGKLLDMV

SEQ ID NO: 8871 - protein, 40 aa, Artificial Sequence
  Description of Artificial Sequence: Synthetic polypeptide
FPQTYSIDINGYILVYSVTSIKSFEVIKVIHGKLLDMVGK

SEQ ID NO: 8872 - protein, 40 aa, Artificial Sequence
  Description of Artificial Sequence: Synthetic polypeptide
QTYSIDINGYILVYSVTSIKSFEVIKVIHGKLLDMVGKVQ

SEQ ID NO: 8873 - protein, 40 aa, Artificial Sequence
  Description of Artificial Sequence: Synthetic polypeptide
TYSIDINGYILVYSVTSIKSFEVIKVIHGKLLDMVGKVQI

SEQ ID NO: 8874 - protein, 40 aa, Artificial Sequence
  Description of Artificial Sequence: Synthetic polypeptide
YSIDINGYILVYSVTSIKSFEVIKVIHGKLLDMVGKVQIP

SEQ ID NO: 8875 - protein, 40 aa, Artificial Sequence
  Description of Artificial Sequence: Synthetic polypeptide
SIDINGYILVYSVTSIKSFEVIKVIHGKLLDMVGKVQIPI

SEQ ID NO: 8876 - protein, 40 aa, Artificial Sequence
  Description of Artificial Sequence: Synthetic polypeptide
IDINGYILVYSVTSIKSFEVIKVIHGKLLDMVGKVQIPIM

SEQ ID NO: 8877 - protein, 40 aa, Artificial Sequence
  Description of Artificial Sequence: Synthetic polypeptide
DINGYILVYSVTSIKSFEVIKVIHGKLLDMVGKVQIPIML

SEQ ID NO: 8878 - protein, 40 aa, Artificial Sequence
  Description of Artificial Sequence: Synthetic polypeptide
INGYILVYSVTSIKSFEVIKVIHGKLLDMVGKVQIPIMLV

SEQ ID NO: 8879 - protein, 40 aa, Artificial Sequence
  Description of Artificial Sequence: Synthetic polypeptide
NGYILVYSVTSIKSFEVIKVIHGKLLDMVGKVQIPIMLVG

SEQ ID NO: 8880 - protein, 40 aa, Artificial Sequence
  Description of Artificial Sequence: Synthetic polypeptide
GYILVYSVTSIKSFEVIKVIHGKLLDMVGKVQIPIMLVGN

SEQ ID NO: 8881 - protein, 40 aa, Artificial Sequence
  Description of Artificial Sequence: Synthetic polypeptide
YILVYSVTSIKSFEVIKVIHGKLLDMVGKVQIPIMLVGNK

SEQ ID NO: 8882 - protein, 40 aa, Artificial Sequence
  Description of Artificial Sequence: Synthetic polypeptide
YSVTSIKSFEVIKVIHGKLLDMVGKVQIPIMLVGNKKDLH

SEQ ID NO: 8883 - protein, 40 aa, Artificial Sequence
  Description of Artificial Sequence: Synthetic polypeptide
SIKSFEVIKVIHGKLLDMVGKVQIPIMLVGNKKDLHMERV

SEQ ID NO: 8884 - protein, 40 aa, Artificial Sequence
  Description of Artificial Sequence: Synthetic polypeptide
IKSFEVIKVIHGKLLDMVGKVQIPIMLVGNKKDLHMERVI

SEQ ID NO: 8885 - protein, 40 aa, Artificial Sequence
  Description of Artificial Sequence: Synthetic polypeptide
SFEVIKVIHGKLLDMVGKVQIPIMLVGNKKDLHMERVISY

SEQ ID NO: 8886 - protein, 40 aa, Artificial Sequence
  Description of Artificial Sequence: Synthetic polypeptide
IKVIHGKLLDMVGKVQIPIMLVGNKKDLHMERVISYEEGK

SEQ ID NO: 8887 - protein, 40 aa, Artificial Sequence
  Description of Artificial Sequence: Synthetic polypeptide
KLLDMVGKVQIPIMLVGNKKDLHMERVISYEEGKALAESW

SEQ ID NO: 8888 - protein, 40 aa, Artificial Sequence
  Description of Artificial Sequence: Synthetic polypeptide
MLDMVGKVQIPIMLVGNKKDLHMERVISYEEGKALAESWN

SEQ ID NO: 8889 - protein, 40 aa, Artificial Sequence
  Description of Artificial Sequence: Synthetic polypeptide
MVGKVQIPIMLVGNKKDLHMERVISYEEGKALAESWNAAF

SEQ ID NO: 8890 - protein, 40 aa, Artificial Sequence
  Description of Artificial Sequence: Synthetic polypeptide
VGKVQIPIMLVGNKKDLHMERVISYEEGKALAESWNAAFL

SEQ ID NO: 8891 - protein, 40 aa, Artificial Sequence
  Description of Artificial Sequence: Synthetic polypeptide
IMLVGNKKDLHMERVISYEEGKALAESWNAAFLESSAKEN

SEQ ID NO: 8892 - protein, 40 aa, Artificial Sequence
  Description of Artificial Sequence: Synthetic polypeptide
MVGNKKDLHMERVISYEEGKALAESWNAAFLESSAKENQT

SEQ ID NO: 8893 - protein, 40 aa, Artificial Sequence
  Description of Artificial Sequence: Synthetic polypeptide
KKDLHMERVISYEEGKALAESWNAAFLESSAKENQTAVDV

SEQ ID NO: 8894 - protein, 40 aa, Artificial Sequence
  Description of Artificial Sequence: Synthetic polypeptide
KDLHMERVISYEEGKALAESWNAAFLESSAKENQTAVDVF

SEQ ID NO: 8895 - protein, 40 aa, Artificial Sequence
  Description of Artificial Sequence: Synthetic polypeptide
DLHMERVISYEEGKALAESWNAAFLESSAKENQTAVDVFR

SEQ ID NO: 8896 - protein, 40 aa, Artificial Sequence
  Description of Artificial Sequence: Synthetic polypeptide
ERVISYEEGKALAESWNAAFLESSAKENQTAVDVFRRIIL

SEQ ID NO: 8897 - protein, 40 aa, Artificial Sequence
  Description of Artificial Sequence: Synthetic polypeptide
ISYEEGKALAESWNAAFLESSAKENQTAVDVFRRIILEAE

SEQ ID NO: 8898 - protein, 40 aa, Artificial Sequence
  Description of Artificial Sequence: Synthetic polypeptide
YEEGKALAESWNAAFLESSAKENQTAVDVFRRIILEAEKM

SEQ ID NO: 8899 - protein, 40 aa, Artificial Sequence
  Description of Artificial Sequence: Synthetic polypeptide
ESWNAAFLESSAKENQTAVDVFRRIILEAEKMDGAASQGK

SEQ ID NO: 8900 - protein, 40 aa, Artificial Sequence
  Description of Artificial Sequence: Synthetic polypeptide
NAAFLESSAKENQTAVDVFRRIILEAEKMDGAASQGKSSC

SEQ ID NO: 8901 - protein, 40 aa, Artificial Sequence
  Description of Artificial Sequence: Synthetic polypeptide
AFLESSAKENQTAVDVFRRIILEAEKMDGAASQGKSSCSV

SEQ ID NO: 8902 - protein, 40 aa, Artificial Sequence
  Description of Artificial Sequence: Synthetic polypeptide
MAAIRKKLVIVGDGACGKTCLLIVFSKDQFPEVYVPTVFE

SEQ ID NO: 8903 - protein, 40 aa, Artificial Sequence
  Description of Artificial Sequence: Synthetic polypeptide
GDGACGKTCLLIVFSKDQFPEVYVPTVFENYVADIEVDGK

SEQ ID NO: 8904 - protein, 40 aa, Artificial Sequence
  Description of Artificial Sequence: Synthetic polypeptide
KTCLLIVFSKDQFPEVYVPTVFENYVADIEVDGKQVELAL

SEQ ID NO: 8905 - protein, 40 aa, Artificial Sequence
  Description of Artificial Sequence: Synthetic polypeptide
FSKDQFPEVYVPTVFENYVADIEVDGKQVELALWDTAGQE

SEQ ID NO: 8906 - protein, 40 aa, Artificial Sequence
  Description of Artificial Sequence: Synthetic polypeptide
DQFPEVYVPTVFENYVADIEVDGKQVELALWDTAGQEDYD

SEQ ID NO: 8907 - protein, 40 aa, Artificial Sequence
  Description of Artificial Sequence: Synthetic polypeptide
FPEVYVPTVFENYVADIEVDGKQVELALWDTAGQEDYDRL

SEQ ID NO: 8908 - protein, 40 aa, Artificial Sequence
  Description of Artificial Sequence: Synthetic polypeptide
PEVYVPTVFENYVADIEVDGKQVELALWDTAGQEDYDRLR

SEQ ID NO: 8909 - protein, 40 aa, Artificial Sequence
  Description of Artificial Sequence: Synthetic polypeptide
DRLRPLSYPDTDVILMCFSIDSPDSLENIPEKWTPEVKHF

SEQ ID NO: 8910 - protein, 40 aa, Artificial Sequence
  Description of Artificial Sequence: Synthetic polypeptide
RLRPLSYPDTDVILMCFSIDSPDSLENIPEKWTPEVKHFC

SEQ ID NO: 8911 - protein, 40 aa, Artificial Sequence
  Description of Artificial Sequence: Synthetic polypeptide
MRPLSYPDTDVILMCFSIDSPDSLENIPEKWTPEVKHFCP

SEQ ID NO: 8912 - protein, 40 aa, Artificial Sequence
  Description of Artificial Sequence: Synthetic polypeptide
PDSLENIPEKWTPEVKHFCPNVPIILVGNKKDLRNDEHTR

SEQ ID NO: 8913 - protein, 40 aa, Artificial Sequence
  Description of Artificial Sequence: Synthetic polypeptide
DSLENIPEKWTPEVKHFCPNVPIILVGNKKDLRNDEHTRR

SEQ ID NO: 8914 - protein, 40 aa, Artificial Sequence
  Description of Artificial Sequence: Synthetic polypeptide
SLENIPEKWTPEVKHFCPNVPIILVGNKKDLRNDEHTRRE

SEQ ID NO: 8915 - protein, 40 aa, Artificial Sequence
  Description of Artificial Sequence: Synthetic polypeptide
VGNKKDLRNDEHTRRELAKMKQEPVKPEEGRDMANRIGAF

SEQ ID NO: 8916 - protein, 40 aa, Artificial Sequence
  Description of Artificial Sequence: Synthetic polypeptide
GNKKDLRNDEHTRRELAKMKQEPVKPEEGRDMANRIGAFG

SEQ ID NO: 8917 - protein, 40 aa, Artificial Sequence
  Description of Artificial Sequence: Synthetic polypeptide
TRRELAKMKQEPVKPEEGRDMANRIGAFGYMECSAKTKDG

SEQ ID NO: 8918 - protein, 40 aa, Artificial Sequence
  Description of Artificial Sequence: Synthetic polypeptide
RRELAKMKQEPVKPEEGRDMANRIGAFGYMECSAKTKDGV

SEQ ID NO: 8919 - protein, 40 aa, Artificial Sequence
  Description of Artificial Sequence: Synthetic polypeptide
LAKMKQEPVKPEEGRDMANRIGAFGYMECSAKTKDGVREV

SEQ ID NO: 8920 - protein, 40 aa, Artificial Sequence
  Description of Artificial Sequence: Synthetic polypeptide
KMKQEPVKPEEGRDMANRIGAFGYMECSAKTKDGVREVFE

SEQ ID NO: 8921 - protein, 40 aa, Artificial Sequence
  Description of Artificial Sequence: Synthetic polypeptide
PVKPEEGRDMANRIGAFGYMECSAKTKDGVREVFEMATRA

SEQ ID NO: 8922 - protein, 40 aa, Artificial Sequence
  Description of Artificial Sequence: Synthetic polypeptide
EEGRDMANRIGAFGYMECSAKTKDGVREVFEMATRAALQA

SEQ ID NO: 8923 - protein, 40 aa, Artificial Sequence
  Description of Artificial Sequence: Synthetic polypeptide
RDMANRIGAFGYMECSAKTKDGVREVFEMATRAALQARRG

SEQ ID NO: 8924 - protein, 40 aa, Artificial Sequence
  Description of Artificial Sequence: Synthetic polypeptide
RIGAFGYMECSAKTKDGVREVFEMATRAALQARRGKKKSG

SEQ ID NO: 8925 - protein, 40 aa, Artificial Sequence
  Description of Artificial Sequence: Synthetic polypeptide
TAGQEEFGAMREQYMRTGEGFLLVFSVTDRGSFEEIYKFQ

SEQ ID NO: 8926 - protein, 40 aa, Artificial Sequence
  Description of Artificial Sequence: Synthetic polypeptide
AGQEEFGAMREQYMRTGEGFLLVFSVTDRGSFEEIYKFQR

SEQ ID NO: 8927 - protein, 40 aa, Artificial Sequence
  Description of Artificial Sequence: Synthetic polypeptide
MREQYMRTGEGFLLVFSVTDRGSFEEIYKFQRQILRVKDR

SEQ ID NO: 8928 - protein, 40 aa, Artificial Sequence
  Description of Artificial Sequence: Synthetic polypeptide
REQYMRTGEGFLLVFSVTDRGSFEEIYKFQRQILRVKDRD

SEQ ID NO: 8929 - protein, 40 aa, Artificial Sequence
  Description of Artificial Sequence: Synthetic polypeptide
QYMRTGEGFLLVFSVTDRGSFEEIYKFQRQILRVKDRDEF

SEQ ID NO: 8930 - protein, 40 aa, Artificial Sequence
  Description of Artificial Sequence: Synthetic polypeptide
TGEGFLLVFSVTDRGSFEEIYKFQRQILRVKDRDEFPMIL

SEQ ID NO: 8931 - protein, 40 aa, Artificial Sequence
  Description of Artificial Sequence: Synthetic polypeptide
FLLVFSVTDRGSFEEIYKFQRQILRVKDRDEFPMILIGNK

SEQ ID NO: 8932 - protein, 40 aa, Artificial Sequence
  Description of Artificial Sequence: Synthetic polypeptide
FSVTDRGSFEEIYKFQRQILRVKDRDEFPMILIGNKADLD

SEQ ID NO: 8933 - protein, 40 aa, Artificial Sequence
  Description of Artificial Sequence: Synthetic polypeptide
VTDRGSFEEIYKFQRQILRVKDRDEFPMILIGNKADLDHQ

SEQ ID NO: 8934 - protein, 40 aa, Artificial Sequence
  Description of Artificial Sequence: Synthetic polypeptide
RGSFEEIYKFQRQILRVKDRDEFPMILIGNKADLDHQRQV

SEQ ID NO: 8935 - protein, 40 aa, Artificial Sequence
  Description of Artificial Sequence: Synthetic polypeptide
FEEIYKFQRQILRVKDRDEFPMILIGNKADLDHQRQVTQE

SEQ ID NO: 8936 - protein, 40 aa, Artificial Sequence
  Description of Artificial Sequence: Synthetic polypeptide
YKFQRQILRVKDRDEFPMILIGNKADLDHQRQVTQEEGQQ

SEQ ID NO: 8937 - protein, 40 aa, Artificial Sequence
  Description of Artificial Sequence: Synthetic polypeptide
RQILRVKDRDEFPMILIGNKADLDHQRQVTQEEGQQLARQ

SEQ ID NO: 8938 - protein, 40 aa, Artificial Sequence
  Description of Artificial Sequence: Synthetic polypeptide
QILRVKDRDEFPMILIGNKADLDHQRQVTQEEGQQLARQL

SEQ ID NO: 8939 - protein, 40 aa, Artificial Sequence
  Description of Artificial Sequence: Synthetic polypeptide
VKDRDEFPMILIGNKADLDHQRQVTQEEGQQLARQLKVTY

SEQ ID NO: 8940 - protein, 40 aa, Artificial Sequence
  Description of Artificial Sequence: Synthetic polypeptide
RDEFPMILIGNKADLDHQRQVTQEEGQQLARQLKVTYMEA

SEQ ID NO: 8941 - protein, 40 aa, Artificial Sequence
  Description of Artificial Sequence: Synthetic polypeptide
EFPMILIGNKADLDHQRQVTQEEGQQLARQLKVTYMEASA

SEQ ID NO: 8942 - protein, 40 aa, Artificial Sequence
  Description of Artificial Sequence: Synthetic polypeptide
GNKADLDHQRQVTQEEGQQLARQLKVTYMEASAKIRMNVD

SEQ ID NO: 8943 - protein, 40 aa, Artificial Sequence
  Description of Artificial Sequence: Synthetic polypeptide
VTQEEGQQLARQLKVTYMEASAKIRMNVDQAFHELVRVIR

SEQ ID NO: 8944 - protein, 40 aa, Artificial Sequence
  Description of Artificial Sequence: Synthetic polypeptide
QEEGQQLARQLKVTYMEASAKIRMNVDQAFHELVRVIRKF

SEQ ID NO: 8945 - protein, 40 aa, Artificial Sequence
  Description of Artificial Sequence: Synthetic polypeptide
EEGQQLARQLKVTYMEASAKIRMNVDQAFHELVRVIRKFQ

SEQ ID NO: 8946 - protein, 40 aa, Artificial Sequence
  Description of Artificial Sequence: Synthetic polypeptide
QQLARQLKVTYMEASAKIRMNVDQAFHELVRVIRKFQEQE

SEQ ID NO: 8947 - protein, 40 aa, Artificial Sequence
  Description of Artificial Sequence: Synthetic polypeptide
QLARQLKVTYMEASAKIRMNVDQAFHELVRVIRKFQEQEC

SEQ ID NO: 8948 - protein, 40 aa, Artificial Sequence
  Description of Artificial Sequence: Synthetic polypeptide
VTYMEASAKIRMNVDQAFHELVRVIRKFQEQECPPSPEPT

SEQ ID NO: 8949 - protein, 40 aa, Artificial Sequence
  Description of Artificial Sequence: Synthetic polypeptide
MNVDQAFHELVRVIRKFQEQECPPSPEPTRKEKDKKGCHC

SEQ ID NO: 8950 - protein, 40 aa, Artificial Sequence
  Description of Artificial Sequence: Synthetic polypeptide
DASTSRRFTPPSTALSPGKMSEALPLGAPDAGAALAGKLR

SEQ ID NO: 8951 - protein, 40 aa, Artificial Sequence
  Description of Artificial Sequence: Synthetic polypeptide
DGTLVTVMAGNDENYSAELRNATAAMKNQVARFNDLRFVG

SEQ ID NO: 8952 - protein, 40 aa, Artificial Sequence
  Description of Artificial Sequence: Synthetic polypeptide
GTLVTVMAGNDENYSAELRNATAAMKNQVARFNDLRFVGR

SEQ ID NO: 8953 - protein, 40 aa, Artificial Sequence
  Description of Artificial Sequence: Synthetic polypeptide
TLVTVMAGNDENYSAELRNATAAMKNQVARFNDLRFVGRS

SEQ ID NO: 8954 - protein, 40 aa, Artificial Sequence
  Description of Artificial Sequence: Synthetic polypeptide
NDENYSAELRNATAAMKNQVARFNDLRFVGRSGRGKSFTL

SEQ ID NO: 8955 - protein, 40 aa, Artificial Sequence
  Description of Artificial Sequence: Synthetic polypeptide
REPRRHRQKLDDQTKPGSLSFSERLSELEQLRRTAMRVSP

SEQ ID NO: 8956 - protein, 40 aa, Artificial Sequence
  Description of Artificial Sequence: Synthetic polypeptide
PRRHRQKLDDQTKPGSLSFSERLSELEQLRRTAMRVSPHH

SEQ ID NO: 8957 - protein, 40 aa, Artificial Sequence
  Description of Artificial Sequence: Synthetic polypeptide
MTAFSDPRQFPALPSISDPRMHYPGAFTYSPTPVTSGIGI

SEQ ID NO: 8958 - protein, 40 aa, Artificial Sequence
  Description of Artificial Sequence: Synthetic polypeptide
PFQASSPSYHLYYGASAGSYQFSMVGGERSPPRILPPCTN

SEQ ID NO: 8959 - protein, 40 aa, Artificial Sequence
  Description of Artificial Sequence: Synthetic polypeptide
ASSPSYHLYYGASAGSYQFSMVGGERSPPRILPPCTNAST

SEQ ID NO: 8960 - protein, 40 aa, Artificial Sequence
  Description of Artificial Sequence: Synthetic polypeptide
SSPSYHLYYGASAGSYQFSMVGGERSPPRILPPCTNASTG

SEQ ID NO: 8961 - protein, 40 aa, Artificial Sequence
  Description of Artificial Sequence: Synthetic polypeptide
SPSYHLYYGASAGSYQFSMVGGERSPPRILPPCTNASTGS

SEQ ID NO: 8962 - protein, 40 aa, Artificial Sequence
  Description of Artificial Sequence: Synthetic polypeptide
PSYHLYYGASAGSYQFSMVGGERSPPRILPPCTNASTGSA

SEQ ID NO: 8963 - protein, 40 aa, Artificial Sequence
  Description of Artificial Sequence: Synthetic polypeptide
YHLYYGASAGSYQFSMVGGERSPPRILPPCTNASTGSALL

SEQ ID NO: 8964 - protein, 40 aa, Artificial Sequence
  Description of Artificial Sequence: Synthetic polypeptide
YYGASAGSYQFSMVGGERSPPRILPPCTNASTGSALLNPS

SEQ ID NO: 8965 - protein, 40 aa, Artificial Sequence
  Description of Artificial Sequence: Synthetic polypeptide
YGASAGSYQFSMVGGERSPPRILPPCTNASTGSALLNPSL

SEQ ID NO: 8966 - protein, 40 aa, Artificial Sequence
  Description of Artificial Sequence: Synthetic polypeptide
VGGERSPPRILPPCTNASTGSALLNPSLPNQSDVVEAEGS

SEQ ID NO: 8967 - protein, 40 aa, Artificial Sequence
  Description of Artificial Sequence: Synthetic polypeptide
AKIAKTHEDIEAQIREIQGKKAALDEAQGVGLDSTGYYDQ

SEQ ID NO: 8968 - protein, 40 aa, Artificial Sequence
  Description of Artificial Sequence: Synthetic polypeptide
HEDIEAQIREIQGKKAALDEAQGVGLDSTGYYDQEIYGGS

SEQ ID NO: 8969 - protein, 40 aa, Artificial Sequence
  Description of Artificial Sequence: Synthetic polypeptide
EDIEAQIREIQGKKAALDEAQGVGLDSTGYYDQEIYGGSD

SEQ ID NO: 8970 - protein, 40 aa, Artificial Sequence
  Description of Artificial Sequence: Synthetic polypeptide
EDEYKKHRRTMIISPERLDPFADGGKTPDPKMNARTYMDV

SEQ ID NO: 8971 - protein, 40 aa, Artificial Sequence
  Description of Artificial Sequence: Synthetic polypeptide
SPERLDPFADGGKTPDPKMNARTYMDVMREQHLTKEEREI

SEQ ID NO: 8972 - protein, 40 aa, Artificial Sequence
  Description of Artificial Sequence: Synthetic polypeptide
TPDPKMNARTYMDVMREQHLTKEEREIRQQLAEKAKAGEL

SEQ ID NO: 8973 - protein, 40 aa, Artificial Sequence
  Description of Artificial Sequence: Synthetic polypeptide
EQHLTKEEREIRQQLAEKAKAGELKVVNGAAASQPPSKRK

SEQ ID NO: 8974 - protein, 40 aa, Artificial Sequence
  Description of Artificial Sequence: Synthetic polypeptide
QHLTKEEREIRQQLAEKAKAGELKVVNGAAASQPPSKRKR

SEQ ID NO: 8975 - protein, 40 aa, Artificial Sequence
  Description of Artificial Sequence: Synthetic polypeptide
HLTKEEREIRQQLAEKAKAGELKVVNGAAASQPPSKRKRR

SEQ ID NO: 8976 - protein, 40 aa, Artificial Sequence
  Description of Artificial Sequence: Synthetic polypeptide
MTKEEREIRQQLAEKAKAGELKVVNGAAASQPPSKRKRRW

SEQ ID NO: 8977 - protein, 40 aa, Artificial Sequence
  Description of Artificial Sequence: Synthetic polypeptide
EEREIRQQLAEKAKAGELKVVNGAAASQPPSKRKRRWDQT

SEQ ID NO: 8978 - protein, 40 aa, Artificial Sequence
  Description of Artificial Sequence: Synthetic polypeptide
EREIRQQLAEKAKAGELKVVNGAAASQPPSKRKRRWDQTA

SEQ ID NO: 8979 - protein, 40 aa, Artificial Sequence
  Description of Artificial Sequence: Synthetic polypeptide
KGSETPGATPGSKIWDPTPSHTPAGAATPGRGDTPGHATP

SEQ ID NO: 8980 - protein, 40 aa, Artificial Sequence
  Description of Artificial Sequence: Synthetic polypeptide
GETPTPGASKRKSRWDETPASQMGGSTPVLTPGKTPIGTP

SEQ ID NO: 8981 - protein, 40 aa, Artificial Sequence
  Description of Artificial Sequence: Synthetic polypeptide
PTPGHIMSMTPEQLQAWRWEREIDERNRPLSDEELDAMFP

SEQ ID NO: 8982 - protein, 40 aa, Artificial Sequence
  Description of Artificial Sequence: Synthetic polypeptide
MSMTPEQLQAWRWEREIDERNRPLSDEELDAMFPEGYKVL

SEQ ID NO: 8983 - protein, 40 aa, Artificial Sequence
  Description of Artificial Sequence: Synthetic polypeptide
MTPEQLQAWRWEREIDERNRPLSDEELDAMFPEGYKVLPP

SEQ ID NO: 8984 - protein, 40 aa, Artificial Sequence
  Description of Artificial Sequence: Synthetic polypeptide
PEQLQAWRWEREIDERNRPLSDEELDAMFPEGYKVLPPPA

SEQ ID NO: 8985 - protein, 40 aa, Artificial Sequence
  Description of Artificial Sequence: Synthetic polypeptide
AWRWEREIDERNRPLSDEELDAMFPEGYKVLPPPAGYVPI

SEQ ID NO: 8986 - protein, 40 aa, Artificial Sequence
  Description of Artificial Sequence: Synthetic polypeptide
PLSDEELDAMFPEGYKVLPPPAGYVPIRTPARKLTATPTP

SEQ ID NO: 8987 - protein, 40 aa, Artificial Sequence
  Description of Artificial Sequence: Synthetic polypeptide
PEGYKVLPPPAGYVPIRTPARKLTATPTPLGGMTGFHMQT

SEQ ID NO: 8988 - protein, 40 aa, Artificial Sequence
  Description of Artificial Sequence: Synthetic polypeptide
RTMKSVNDQPSGNLPFLKPDDIQYFDKLLVDVDESTLSPE

SEQ ID NO: 8989 - protein, 40 aa, Artificial Sequence
  Description of Artificial Sequence: Synthetic polypeptide
DQPSGNLPFLKPDDIQYFDKLLVDVDESTLSPEEQKERKI

SEQ ID NO: 8990 - protein, 40 aa, Artificial Sequence
  Description of Artificial Sequence: Synthetic polypeptide
NLPFLKPDDIQYFDKLLVDVDESTLSPEEQKERKIMKLLL

SEQ ID NO: 8991 - protein, 40 aa, Artificial Sequence
  Description of Artificial Sequence: Synthetic polypeptide
LPFLKPDDIQYFDKLLVDVDESTLSPEEQKERKIMKLLLK

SEQ ID NO: 8992 - protein, 40 aa, Artificial Sequence
  Description of Artificial Sequence: Synthetic polypeptide
PDDIQYFDKLLVDVDESTLSPEEQKERKIMKLLLKIKNGT

SEQ ID NO: 8993 - protein, 40 aa, Artificial Sequence
  Description of Artificial Sequence: Synthetic polypeptide
DDIQYFDKLLVDVDESTLSPEEQKERKIMKLLLKIKNGTP

SEQ ID NO: 8994 - protein, 40 aa, Artificial Sequence
  Description of Artificial Sequence: Synthetic polypeptide
DIQYFDKLLVDVDESTLSPEEQKERKIMKLLLKIKNGTPP

SEQ ID NO: 8995 - protein, 40 aa, Artificial Sequence
  Description of Artificial Sequence: Synthetic polypeptide
KLLVDVDESTLSPEEQKERKIMKLLLKIKNGTPPMRKAAL

SEQ ID NO: 8996 - protein, 40 aa, Artificial Sequence
  Description of Artificial Sequence: Synthetic polypeptide
LLVDVDESTLSPEEQKERKIMKLLLKIKNGTPPMRKAALR

SEQ ID NO: 8997 - protein, 40 aa, Artificial Sequence
  Description of Artificial Sequence: Synthetic polypeptide
VDVDESTLSPEEQKERKIMKLLLKIKNGTPPMRKAALRQI

SEQ ID NO: 8998 - protein, 40 aa, Artificial Sequence
  Description of Artificial Sequence: Synthetic polypeptide
VDESTLSPEEQKERKIMKLLLKIKNGTPPMRKAALRQITD

SEQ ID NO: 8999 - protein, 40 aa, Artificial Sequence
  Description of Artificial Sequence: Synthetic polypeptide
DESTLSPEEQKERKIMKLLLKIKNGTPPMRKAALRQITDK

SEQ ID NO: 9000 - protein, 40 aa, Artificial Sequence
  Description of Artificial Sequence: Synthetic polypeptide
ESTLSPEEQKERKIMKLLLKIKNGTPPMRKAALRQITDKA

SEQ ID NO: 9001 - protein, 40 aa, Artificial Sequence
  Description of Artificial Sequence: Synthetic polypeptide
STLSPEEQKERKIMKLLLKIKNGTPPMRKAALRQITDKAR

SEQ ID NO: 9002 - protein, 40 aa, Artificial Sequence
  Description of Artificial Sequence: Synthetic polypeptide
TLSPEEQKERKIMKLLLKIKNGTPPMRKAALRQITDKARE

SEQ ID NO: 9003 - protein, 40 aa, Artificial Sequence
  Description of Artificial Sequence: Synthetic polypeptide
LSPEEQKERKIMKLLLKIKNGTPPMRKAALRQITDKAREF

SEQ ID NO: 9004 - protein, 40 aa, Artificial Sequence
  Description of Artificial Sequence: Synthetic polypeptide
SPEEQKERKIMKLLLKIKNGTPPMRKAALRQITDKAREFG

SEQ ID NO: 9005 - protein, 40 aa, Artificial Sequence
  Description of Artificial Sequence: Synthetic polypeptide
PEEQKERKIMKLLLKIKNGTPPMRKAALRQITDKAREFGA

SEQ ID NO: 9006 - protein, 40 aa, Artificial Sequence
  Description of Artificial Sequence: Synthetic polypeptide
EEQKERKIMKLLLKIKNGTPPMRKAALRQITDKAREFGAG

SEQ ID NO: 9007 - protein, 40 aa, Artificial Sequence
  Description of Artificial Sequence: Synthetic polypeptide
MKLLLKIKNGTPPMRKAALRQITDKAREFGAGPLFNQILP

SEQ ID NO: 9008 - protein, 40 aa, Artificial Sequence
  Description of Artificial Sequence: Synthetic polypeptide
LLKIKNGTPPMRKAALRQITDKAREFGAGPLFNQILPLLM

SEQ ID NO: 9009 - protein, 40 aa, Artificial Sequence
  Description of Artificial Sequence: Synthetic polypeptide
KAALRQITDKAREFGAGPLFNQILPLLMSPTLEDQERHLL

SEQ ID NO: 9010 - protein, 40 aa, Artificial Sequence
  Description of Artificial Sequence: Synthetic polypeptide
ALRQITDKAREFGAGPLFNQILPLLMSPTLEDQERHLLVK

SEQ ID NO: 9011 - protein, 40 aa, Artificial Sequence
  Description of Artificial Sequence: Synthetic polypeptide
MRQITDKAREFGAGPLFNQILPLLMSPTLEDQERHLLVKV

SEQ ID NO: 9012 - protein, 40 aa, Artificial Sequence
  Description of Artificial Sequence: Synthetic polypeptide
QITDKAREFGAGPLFNQILPLLMSPTLEDQERHLLVKVID

SEQ ID NO: 9013 - protein, 40 aa, Artificial Sequence
  Description of Artificial Sequence: Synthetic polypeptide
ITDKAREFGAGPLFNQILPLLMSPTLEDQERHLLVKVIDR

SEQ ID NO: 9014 - protein, 40 aa, Artificial Sequence
  Description of Artificial Sequence: Synthetic polypeptide
KAREFGAGPLFNQILPLLMSPTLEDQERHLLVKVIDRILY

SEQ ID NO: 9015 - protein, 40 aa, Artificial Sequence
  Description of Artificial Sequence: Synthetic polypeptide
AREFGAGPLFNQILPLLMSPTLEDQERHLLVKVIDRILYK

SEQ ID NO: 9016 - protein, 40 aa, Artificial Sequence
  Description of Artificial Sequence: Synthetic polypeptide
REFGAGPLFNQILPLLMSPTLEDQERHLLVKVIDRILYKL

SEQ ID NO: 9017 - protein, 40 aa, Artificial Sequence
  Description of Artificial Sequence: Synthetic polypeptide
EFGAGPLFNQILPLLMSPTLEDQERHLLVKVIDRILYKLD

SEQ ID NO: 9018 - protein, 40 aa, Artificial Sequence
  Description of Artificial Sequence: Synthetic polypeptide
GAGPLFNQILPLLMSPTLEDQERHLLVKVIDRILYKLDDL

SEQ ID NO: 9019 - protein, 40 aa, Artificial Sequence
  Description of Artificial Sequence: Synthetic polypeptide
GPLFNQILPLLMSPTLEDQERHLLVKVIDRILYKLDDLVR

SEQ ID NO: 9020 - protein, 40 aa, Artificial Sequence
  Description of Artificial Sequence: Synthetic polypeptide
PLFNQILPLLMSPTLEDQERHLLVKVIDRILYKLDDLVRP

SEQ ID NO: 9021 - protein, 40 aa, Artificial Sequence
  Description of Artificial Sequence: Synthetic polypeptide
MFNQILPLLMSPTLEDQERHLLVKVIDRILYKLDDLVRPY

SEQ ID NO: 9022 - protein, 40 aa, Artificial Sequence
  Description of Artificial Sequence: Synthetic polypeptide
ILPLLMSPTLEDQERHLLVKVIDRILYKLDDLVRPYVHKI

SEQ ID NO: 9023 - protein, 40 aa, Artificial Sequence
  Description of Artificial Sequence: Synthetic polypeptide
PLLMSPTLEDQERHLLVKVIDRILYKLDDLVRPYVHKILV

SEQ ID NO: 9024 - protein, 40 aa, Artificial Sequence
  Description of Artificial Sequence: Synthetic polypeptide
MMSPTLEDQERHLLVKVIDRILYKLDDLVRPYVHKILVVI

SEQ ID NO: 9025 - protein, 40 aa, Artificial Sequence
  Description of Artificial Sequence: Synthetic polypeptide
TLEDQERHLLVKVIDRILYKLDDLVRPYVHKILVVIEPLL

SEQ ID NO: 9026 - protein, 40 aa, Artificial Sequence
  Description of Artificial Sequence: Synthetic polypeptide
LEDQERHLLVKVIDRILYKLDDLVRPYVHKILVVIEPLLI

SEQ ID NO: 9027 - protein, 40 aa, Artificial Sequence
  Description of Artificial Sequence: Synthetic polypeptide
VIDRILYKLDDLVRPYVHKILVVIEPLLIDEDYYARVEGR

SEQ ID NO: 9028 - protein, 40 aa, Artificial Sequence
  Description of Artificial Sequence: Synthetic polypeptide
ILYKLDDLVRPYVHKILVVIEPLLIDEDYYARVEGREIIS

SEQ ID NO: 9029 - protein, 40 aa, Artificial Sequence
  Description of Artificial Sequence: Synthetic polypeptide
DLVRPYVHKILVVIEPLLIDEDYYARVEGREIISNLAKAA

SEQ ID NO: 9030 - protein, 40 aa, Artificial Sequence
  Description of Artificial Sequence: Synthetic polypeptide
PDIDNMDEYVRNTTARAFAVVASALGIPSLLPFLKAVCKS

SEQ ID NO: 9031 - protein, 40 aa, Artificial Sequence
  Description of Artificial Sequence: Synthetic polypeptide
DEYVRNTTARAFAVVASALGIPSLLPFLKAVCKSKKSWQA

SEQ ID NO: 9032 - protein, 40 aa, Artificial Sequence
  Description of Artificial Sequence: Synthetic polypeptide
LLPFLKAVCKSKKSWQARHTGIKIVQQIAILMGCAILPHL

SEQ ID NO: 9033 - protein, 40 aa, Artificial Sequence
  Description of Artificial Sequence: Synthetic polypeptide
MPFLKAVCKSKKSWQARHTGIKIVQQIAILMGCAILPHLR

SEQ ID NO: 9034 - protein, 40 aa, Artificial Sequence
  Description of Artificial Sequence: Synthetic polypeptide
LKAVCKSKKSWQARHTGIKIVQQIAILMGCAILPHLRSLV

SEQ ID NO: 9035 - protein, 40 aa, Artificial Sequence
  Description of Artificial Sequence: Synthetic polypeptide
CKSKKSWQARHTGIKIVQQIAILMGCAILPHLRSLVEIIE

SEQ ID NO: 9036 - protein, 40 aa, Artificial Sequence
  Description of Artificial Sequence: Synthetic polypeptide
SWQARHTGIKIVQQIAILMGCAILPHLRSLVEIIEHGLVD

SEQ ID NO: 9037 - protein, 40 aa, Artificial Sequence
  Description of Artificial Sequence: Synthetic polypeptide
ARHTGIKIVQQIAILMGCAILPHLRSLVEIIEHGLVDEQQ

SEQ ID NO: 9038 - protein, 40 aa, Artificial Sequence
  Description of Artificial Sequence: Synthetic polypeptide
GIKIVQQIAILMGCAILPHLRSLVEIIEHGLVDEQQKVRT

SEQ ID NO: 9039 - protein, 40 aa, Artificial Sequence
  Description of Artificial Sequence: Synthetic polypeptide
VQQIAILMGCAILPHLRSLVEIIEHGLVDEQQKVRTISAL

SEQ ID NO: 9040 - protein, 40 aa, Artificial Sequence
  Description of Artificial Sequence: Synthetic polypeptide
QQIAILMGCAILPHLRSLVEIIEHGLVDEQQKVRTISALA

SEQ ID NO: 9041 - protein, 40 aa, Artificial Sequence
  Description of Artificial Sequence: Synthetic polypeptide
QIAILMGCAILPHLRSLVEIIEHGLVDEQQKVRTISALAI

SEQ ID NO: 9042 - protein, 40 aa, Artificial Sequence
  Description of Artificial Sequence: Synthetic polypeptide
CAILPHLRSLVEIIEHGLVDEQQKVRTISALAIAALAEAA

SEQ ID NO: 9043 - protein, 40 aa, Artificial Sequence
  Description of Artificial Sequence: Synthetic polypeptide
IIEHGLVDEQQKVRTISALAIAALAEAATPYGIESFDSVL

SEQ ID NO: 9044 - protein, 40 aa, Artificial Sequence
  Description of Artificial Sequence: Synthetic polypeptide
HGLVDEQQKVRTISALAIAALAEAATPYGIESFDSVLKPL

SEQ ID NO: 9045 - protein, 40 aa, Artificial Sequence
  Description of Artificial Sequence: Synthetic polypeptide
GLVDEQQKVRTISALAIAALAEAATPYGIESFDSVLKPLW

SEQ ID NO: 9046 - protein, 40 aa, Artificial Sequence
  Description of Artificial Sequence: Synthetic polypeptide
RTISALAIAALAEAATPYGIESFDSVLKPLWKGIRQHRGK

SEQ ID NO: 9047 - protein, 40 aa, Artificial Sequence
  Description of Artificial Sequence: Synthetic polypeptide
AIAALAEAATPYGIESFDSVLKPLWKGIRQHRGKGLAAFL

SEQ ID NO: 9048 - protein, 40 aa, Artificial Sequence
  Description of Artificial Sequence: Synthetic polypeptide
AALAEAATPYGIESFDSVLKPLWKGIRQHRGKGLAAFLKA

SEQ ID NO: 9049 - protein, 40 aa, Artificial Sequence
  Description of Artificial Sequence: Synthetic polypeptide
ALAEAATPYGIESFDSVLKPLWKGIRQHRGKGLAAFLKAI

SEQ ID NO: 9050 - protein, 40 aa, Artificial Sequence
  Description of Artificial Sequence: Synthetic polypeptide
EAATPYGIESFDSVLKPLWKGIRQHRGKGLAAFLKAIGYL

SEQ ID NO: 9051 - protein, 40 aa, Artificial Sequence
  Description of Artificial Sequence: Synthetic polypeptide
TPYGIESFDSVLKPLWKGIRQHRGKGLAAFLKAIGYLIPL

SEQ ID NO: 9052 - protein, 40 aa, Artificial Sequence
  Description of Artificial Sequence: Synthetic polypeptide
DSVLKPLWKGIRQHRGKGLAAFLKAIGYLIPLMDAEYANY

SEQ ID NO: 9053 - protein, 40 aa, Artificial Sequence
  Description of Artificial Sequence: Synthetic polypeptide
KPLWKGIRQHRGKGLAAFLKAIGYLIPLMDAEYANYYTRE

SEQ ID NO: 9054 - protein, 40 aa, Artificial Sequence
  Description of Artificial Sequence: Synthetic polypeptide
IRQHRGKGLAAFLKAIGYLIPLMDAEYANYYTREVMLILI

SEQ ID NO: 9055 - protein, 40 aa, Artificial Sequence
  Description of Artificial Sequence: Synthetic polypeptide
RGKGLAAFLKAIGYLIPLMDAEYANYYTREVMLILIREFQ

SEQ ID NO: 9056 - protein, 40 aa, Artificial Sequence
  Description of Artificial Sequence: Synthetic polypeptide
MAAFLKAIGYLIPLMDAEYANYYTREVMLILIREFQSPDE

SEQ ID NO: 9057 - protein, 40 aa, Artificial Sequence
  Description of Artificial Sequence: Synthetic polypeptide
IGYLIPLMDAEYANYYTREVMLILIREFQSPDEEMKKIVL

SEQ ID NO: 9058 - protein, 40 aa, Artificial Sequence
  Description of Artificial Sequence: Synthetic polypeptide
GYLIPLMDAEYANYYTREVMLILIREFQSPDEEMKKIVLK

SEQ ID NO: 9059 - protein, 40 aa, Artificial Sequence
  Description of Artificial Sequence: Synthetic polypeptide
LIPLMDAEYANYYTREVMLILIREFQSPDEEMKKIVLKVV

SEQ ID NO: 9060 - protein, 40 aa, Artificial Sequence
  Description of Artificial Sequence: Synthetic polypeptide
PLMDAEYANYYTREVMLILIREFQSPDEEMKKIVLKVVKQ

SEQ ID NO: 9061 - protein, 40 aa, Artificial Sequence
  Description of Artificial Sequence: Synthetic polypeptide
DAEYANYYTREVMLILIREFQSPDEEMKKIVLKVVKQCCG

SEQ ID NO: 9062 - protein, 40 aa, Artificial Sequence
  Description of Artificial Sequence: Synthetic polypeptide
AEYANYYTREVMLILIREFQSPDEEMKKIVLKVVKQCCGT

SEQ ID NO: 9063 - protein, 40 aa, Artificial Sequence
  Description of Artificial Sequence: Synthetic polypeptide
MLILIREFQSPDEEMKKIVLKVVKQCCGTDGVEANYIKTE

SEQ ID NO: 9064 - protein, 40 aa, Artificial Sequence
  Description of Artificial Sequence: Synthetic polypeptide
LIREFQSPDEEMKKIVLKVVKQCCGTDGVEANYIKTEILP

SEQ ID NO: 9065 - protein, 40 aa, Artificial Sequence
  Description of Artificial Sequence: Synthetic polypeptide
SPDEEMKKIVLKVVKQCCGTDGVEANYIKTEILPPFFKHF

SEQ ID NO: 9066 - protein, 40 aa, Artificial Sequence
  Description of Artificial Sequence: Synthetic polypeptide
DEEMKKIVLKVVKQCCGTDGVEANYIKTEILPPFFKHFWQ

SEQ ID NO: 9067 - protein, 40 aa, Artificial Sequence
  Description of Artificial Sequence: Synthetic polypeptide
EMKKIVLKVVKQCCGTDGVEANYIKTEILPPFFKHFWQHR

SEQ ID NO: 9068 - protein, 40 aa, Artificial Sequence
  Description of Artificial Sequence: Synthetic polypeptide
KKIVLKVVKQCCGTDGVEANYIKTEILPPFFKHFWQHRMA

SEQ ID NO: 9069 - protein, 40 aa, Artificial Sequence
  Description of Artificial Sequence: Synthetic polypeptide
VLKVVKQCCGTDGVEANYIKTEILPPFFKHFWQHRMALDR

SEQ ID NO: 9070 - protein, 40 aa, Artificial Sequence
  Description of Artificial Sequence: Synthetic polypeptide
KVVKQCCGTDGVEANYIKTEILPPFFKHFWQHRMALDRRN

SEQ ID NO: 9071 - protein, 40 aa, Artificial Sequence
  Description of Artificial Sequence: Synthetic polypeptide
QCCGTDGVEANYIKTEILPPFFKHFWQHRMALDRRNYRQL

SEQ ID NO: 9072 - protein, 40 aa, Artificial Sequence
  Description of Artificial Sequence: Synthetic polypeptide
EANYIKTEILPPFFKHFWQHRMALDRRNYRQLVDTTVELA

SEQ ID NO: 9073 - protein, 40 aa, Artificial Sequence
  Description of Artificial Sequence: Synthetic polypeptide
ANYIKTEILPPFFKHFWQHRMALDRRNYRQLVDTTVELAN

SEQ ID NO: 9074 - protein, 40 aa, Artificial Sequence
  Description of Artificial Sequence: Synthetic polypeptide
NYIKTEILPPFFKHFWQHRMALDRRNYRQLVDTTVELANK

SEQ ID NO: 9075 - protein, 40 aa, Artificial Sequence
  Description of Artificial Sequence: Synthetic polypeptide
EILPPFFKHFWQHRMALDRRNYRQLVDTTVELANKVGAAE

SEQ ID NO: 9076 - protein, 40 aa, Artificial Sequence
  Description of Artificial Sequence: Synthetic polypeptide
KHFWQHRMALDRRNYRQLVDTTVELANKVGAAEIISRIVD

SEQ ID NO: 9077 - protein, 40 aa, Artificial Sequence
  Description of Artificial Sequence: Synthetic polypeptide
WQHRMALDRRNYRQLVDTTVELANKVGAAEIISRIVDDLK

SEQ ID NO: 9078 - protein, 40 aa, Artificial Sequence
  Description of Artificial Sequence: Synthetic polypeptide
MDRRNYRQLVDTTVELANKVGAAEIISRIVDDLKDEAEQY

SEQ ID NO: 9079 - protein, 40 aa, Artificial Sequence
  Description of Artificial Sequence: Synthetic polypeptide
QLVDTTVELANKVGAAEIISRIVDDLKDEAEQYRKMVMET

SEQ ID NO: 9080 - protein, 40 aa, Artificial Sequence
  Description of Artificial Sequence: Synthetic polypeptide
ANKVGAAEIISRIVDDLKDEAEQYRKMVMETIEKIMGNLG

SEQ ID NO: 9081 - protein, 40 aa, Artificial Sequence
  Description of Artificial Sequence: Synthetic polypeptide
NKVGAAEIISRIVDDLKDEAEQYRKMVMETIEKIMGNLGA

SEQ ID NO: 9082 - protein, 40 aa, Artificial Sequence
  Description of Artificial Sequence: Synthetic polypeptide
AEIISRIVDDLKDEAEQYRKMVMETIEKIMGNLGAADIDH

SEQ ID NO: 9083 - protein, 40 aa, Artificial Sequence
  Description of Artificial Sequence: Synthetic polypeptide
IVDDLKDEAEQYRKMVMETIEKIMGNLGAADIDHKLEEQL

SEQ ID NO: 9084 - protein, 40 aa, Artificial Sequence
  Description of Artificial Sequence: Synthetic polypeptide
MKDEAEQYRKMVMETIEKIMGNLGAADIDHKLEEQLIDGI

SEQ ID NO: 9085 - protein, 40 aa, Artificial Sequence
  Description of Artificial Sequence: Synthetic polypeptide
AEQYRKMVMETIEKIMGNLGAADIDHKLEEQLIDGILYAF

SEQ ID NO: 9086 - protein, 40 aa, Artificial Sequence
  Description of Artificial Sequence: Synthetic polypeptide
RKMVMETIEKIMGNLGAADIDHKLEEQLIDGILYAFQEQT

SEQ ID NO: 9087 - protein, 40 aa, Artificial Sequence
  Description of Artificial Sequence: Synthetic polypeptide
IMGNLGAADIDHKLEEQLIDGILYAFQEQTTEDSVMLNGF

SEQ ID NO: 9088 - protein, 40 aa, Artificial Sequence
  Description of Artificial Sequence: Synthetic polypeptide
IDHKLEEQLIDGILYAFQEQTTEDSVMLNGFGTVVNALGK

SEQ ID NO: 9089 - protein, 40 aa, Artificial Sequence
  Description of Artificial Sequence: Synthetic polypeptide
EDSVMLNGFGTVVNALGKRVKPYLPQICGTVLWRLNNKSA

SEQ ID NO: 9090 - protein, 40 aa, Artificial Sequence
  Description of Artificial Sequence: Synthetic polypeptide
SVMLNGFGTVVNALGKRVKPYLPQICGTVLWRLNNKSAKV

SEQ ID NO: 9091 - protein, 40 aa, Artificial Sequence
  Description of Artificial Sequence: Synthetic polypeptide
GFGTVVNALGKRVKPYLPQICGTVLWRLNNKSAKVRQQAA

SEQ ID NO: 9092 - protein, 40 aa, Artificial Sequence
  Description of Artificial Sequence: Synthetic polypeptide
VNALGKRVKPYLPQICGTVLWRLNNKSAKVRQQAADLISR

SEQ ID NO: 9093 - protein, 40 aa, Artificial Sequence
  Description of Artificial Sequence: Synthetic polypeptide
NALGKRVKPYLPQICGTVLWRLNNKSAKVRQQAADLISRT

SEQ ID NO: 9094 - protein, 40 aa, Artificial Sequence
  Description of Artificial Sequence: Synthetic polypeptide
ALGKRVKPYLPQICGTVLWRLNNKSAKVRQQAADLISRTA

SEQ ID NO: 9095 - protein, 40 aa, Artificial Sequence
  Description of Artificial Sequence: Synthetic polypeptide
KPYLPQICGTVLWRLNNKSAKVRQQAADLISRTAVVMKTC

SEQ ID NO: 9096 - protein, 40 aa, Artificial Sequence
  Description of Artificial Sequence: Synthetic polypeptide
AADLISRTAVVMKTCQEEKLMGHLGVVLYEYLGEEYPEVL

SEQ ID NO: 9097 - protein, 40 aa, Artificial Sequence
  Description of Artificial Sequence: Synthetic polypeptide
ISRTAVVMKTCQEEKLMGHLGVVLYEYLGEEYPEVLGSIL

SEQ ID NO: 9098 - protein, 40 aa, Artificial Sequence
  Description of Artificial Sequence: Synthetic polypeptide
TAVVMKTCQEEKLMGHLGVVLYEYLGEEYPEVLGSILGAL

SEQ ID NO: 9099 - protein, 40 aa, Artificial Sequence
  Description of Artificial Sequence: Synthetic polypeptide
VVMKTCQEEKLMGHLGVVLYEYLGEEYPEVLGSILGALKA

SEQ ID NO: 9100 - protein, 40 aa, Artificial Sequence
  Description of Artificial Sequence: Synthetic polypeptide
CQEEKLMGHLGVVLYEYLGEEYPEVLGSILGALKAIVNVI

SEQ ID NO: 9101 - protein, 40 aa, Artificial Sequence
  Description of Artificial Sequence: Synthetic polypeptide
EEKLMGHLGVVLYEYLGEEYPEVLGSILGALKAIVNVIGM

SEQ ID NO: 9102 - protein, 40 aa, Artificial Sequence
  Description of Artificial Sequence: Synthetic polypeptide
GHLGVVLYEYLGEEYPEVLGSILGALKAIVNVIGMHKMTP

SEQ ID NO: 9103 - protein, 40 aa, Artificial Sequence
  Description of Artificial Sequence: Synthetic polypeptide
HLGVVLYEYLGEEYPEVLGSILGALKAIVNVIGMHKMTPP

SEQ ID NO: 9104 - protein, 40 aa, Artificial Sequence
  Description of Artificial Sequence: Synthetic polypeptide
VLYEYLGEEYPEVLGSILGALKAIVNVIGMHKMTPPIKDL

SEQ ID NO: 9105 - protein, 40 aa, Artificial Sequence
  Description of Artificial Sequence: Synthetic polypeptide
MYEYLGEEYPEVLGSILGALKAIVNVIGMHKMTPPIKDLL

SEQ ID NO: 9106 - protein, 40 aa, Artificial Sequence
  Description of Artificial Sequence: Synthetic polypeptide
YEYLGEEYPEVLGSILGALKAIVNVIGMHKMTPPIKDLLP

SEQ ID NO: 9107 - protein, 40 aa, Artificial Sequence
  Description of Artificial Sequence: Synthetic polypeptide
EKVQENCIDLVGRIADRGAEYVSAREWMRICFELLELLKA

SEQ ID NO: 9108 - protein, 40 aa, Artificial Sequence
  Description of Artificial Sequence: Synthetic polypeptide
GAEYVSAREWMRICFELLELLKAHKKAIRRATVNTFGYIA

SEQ ID NO: 9109 - protein, 40 aa, Artificial Sequence
  Description of Artificial Sequence: Synthetic polypeptide
REWMRICFELLELLKAHKKAIRRATVNTFGYIAKAIGPHD

SEQ ID NO: 9110 - protein, 40 aa, Artificial Sequence
  Description of Artificial Sequence: Synthetic polypeptide
CFELLELLKAHKKAIRRATVNTFGYIAKAIGPHDVLATLL

SEQ ID NO: 9111 - protein, 40 aa, Artificial Sequence
  Description of Artificial Sequence: Synthetic polypeptide
LELLKAHKKAIRRATVNTFGYIAKAIGPHDVLATLLNNLK

SEQ ID NO: 9112 - protein, 40 aa, Artificial Sequence
  Description of Artificial Sequence: Synthetic polypeptide
ELLKAHKKAIRRATVNTFGYIAKAIGPHDVLATLLNNLKV

SEQ ID NO: 9113 - protein, 40 aa, Artificial Sequence
  Description of Artificial Sequence: Synthetic polypeptide
KKAIRRATVNTFGYIAKAIGPHDVLATLLNNLKVQERQNR

SEQ ID NO: 9114 - protein, 40 aa, Artificial Sequence
  Description of Artificial Sequence: Synthetic polypeptide
AIRRATVNTFGYIAKAIGPHDVLATLLNNLKVQERQNRVC

SEQ ID NO: 9115 - protein, 40 aa, Artificial Sequence
  Description of Artificial Sequence: Synthetic polypeptide
IRRATVNTFGYIAKAIGPHDVLATLLNNLKVQERQNRVCT

SEQ ID NO: 9116 - protein, 40 aa, Artificial Sequence
  Description of Artificial Sequence: Synthetic polypeptide
RATVNTFGYIAKAIGPHDVLATLLNNLKVQERQNRVCTTV

SEQ ID NO: 9117 - protein, 40 aa, Artificial Sequence
  Description of Artificial Sequence: Synthetic polypeptide
KAIGPHDVLATLLNNLKVQERQNRVCTTVAIAIVAETCSP

SEQ ID NO: 9118 - protein, 40 aa, Artificial Sequence
  Description of Artificial Sequence: Synthetic polypeptide
RQNRVCTTVAIAIVAETCSPFTVLPALMNEYRVPELNVQN

SEQ ID NO: 9119 - protein, 40 aa, Artificial Sequence
  Description of Artificial Sequence: Synthetic polypeptide
TTVAIAIVAETCSPFTVLPALMNEYRVPELNVQNGVLKSL

SEQ ID NO: 9120 - protein, 40 aa, Artificial Sequence
  Description of Artificial Sequence: Synthetic polypeptide
TVAIAIVAETCSPFTVLPALMNEYRVPELNVQNGVLKSLS

SEQ ID NO: 9121 - protein, 40 aa, Artificial Sequence
  Description of Artificial Sequence: Synthetic polypeptide
VAIAIVAETCSPFTVLPALMNEYRVPELNVQNGVLKSLSF

SEQ ID NO: 9122 - protein, 40 aa, Artificial Sequence
  Description of Artificial Sequence: Synthetic polypeptide
IAIVAETCSPFTVLPALMNEYRVPELNVQNGVLKSLSFLF

SEQ ID NO: 9123 - protein, 40 aa, Artificial Sequence
  Description of Artificial Sequence: Synthetic polypeptide
AIVAETCSPFTVLPALMNEYRVPELNVQNGVLKSLSFLFE

SEQ ID NO: 9124 - protein, 40 aa, Artificial Sequence
  Description of Artificial Sequence: Synthetic polypeptide
IVAETCSPFTVLPALMNEYRVPELNVQNGVLKSLSFLFEY

SEQ ID NO: 9125 - protein, 40 aa, Artificial Sequence
  Description of Artificial Sequence: Synthetic polypeptide
AETCSPFTVLPALMNEYRVPELNVQNGVLKSLSFLFEYIG

SEQ ID NO: 9126 - protein, 40 aa, Artificial Sequence
  Description of Artificial Sequence: Synthetic polypeptide
TCSPFTVLPALMNEYRVPELNVQNGVLKSLSFLFEYIGEM

SEQ ID NO: 9127 - protein, 40 aa, Artificial Sequence
  Description of Artificial Sequence: Synthetic polypeptide
SPFTVLPALMNEYRVPELNVQNGVLKSLSFLFEYIGEMGK

SEQ ID NO: 9128 - protein, 40 aa, Artificial Sequence
  Description of Artificial Sequence: Synthetic polypeptide
YRVPELNVQNGVLKSLSFLFEYIGEMGKDYIYAVTPLLED

SEQ ID NO: 9129 - protein, 40 aa, Artificial Sequence
  Description of Artificial Sequence: Synthetic polypeptide
ELNVQNGVLKSLSFLFEYIGEMGKDYIYAVTPLLEDALMD

SEQ ID NO: 9130 - protein, 40 aa, Artificial Sequence
  Description of Artificial Sequence: Synthetic polypeptide
NVQNGVLKSLSFLFEYIGEMGKDYIYAVTPLLEDALMDRD

SEQ ID NO: 9131 - protein, 40 aa, Artificial Sequence
  Description of Artificial Sequence: Synthetic polypeptide
VQNGVLKSLSFLFEYIGEMGKDYIYAVTPLLEDALMDRDL

SEQ ID NO: 9132 - protein, 40 aa, Artificial Sequence
  Description of Artificial Sequence: Synthetic polypeptide
QNGVLKSLSFLFEYIGEMGKDYIYAVTPLLEDALMDRDLV

SEQ ID NO: 9133 - protein, 40 aa, Artificial Sequence
  Description of Artificial Sequence: Synthetic polypeptide
YIGEMGKDYIYAVTPLLEDALMDRDLVHRQTASAVVQHMS

SEQ ID NO: 9134 - protein, 40 aa, Artificial Sequence
  Description of Artificial Sequence: Synthetic polypeptide
DALMDRDLVHRQTASAVVQHMSLGVYGFGCEDSLNHLLNY

SEQ ID NO: 9135 - protein, 40 aa, Artificial Sequence
  Description of Artificial Sequence: Synthetic polypeptide
HRQTASAVVQHMSLGVYGFGCEDSLNHLLNYVWPNVFETS

SEQ ID NO: 9136 - protein, 40 aa, Artificial Sequence
  Description of Artificial Sequence: Synthetic polypeptide
RQTASAVVQHMSLGVYGFGCEDSLNHLLNYVWPNVFETSP

SEQ ID NO: 9137 - protein, 40 aa, Artificial Sequence
  Description of Artificial Sequence: Synthetic polypeptide
TASAVVQHMSLGVYGFGCEDSLNHLLNYVWPNVFETSPHV

SEQ ID NO: 9138 - protein, 40 aa, Artificial Sequence
  Description of Artificial Sequence: Synthetic polypeptide
ASAVVQHMSLGVYGFGCEDSLNHLLNYVWPNVFETSPHVI

SEQ ID NO: 9139 - protein, 40 aa, Artificial Sequence
  Description of Artificial Sequence: Synthetic polypeptide
HMSLGVYGFGCEDSLNHLLNYVWPNVFETSPHVIQAVMGA

SEQ ID NO: 9140 - protein, 40 aa, Artificial Sequence
  Description of Artificial Sequence: Synthetic polypeptide
SLGVYGFGCEDSLNHLLNYVWPNVFETSPHVIQAVMGALE

SEQ ID NO: 9141 - protein, 40 aa, Artificial Sequence
  Description of Artificial Sequence: Synthetic polypeptide
SLNHLLNYVWPNVFETSPHVIQAVMGALEGLRVAIGPCRM

SEQ ID NO: 9142 - protein, 40 aa, Artificial Sequence
  Description of Artificial Sequence: Synthetic polypeptide
MNHLLNYVWPNVFETSPHVIQAVMGALEGLRVAIGPCRML

SEQ ID NO: 9143 - protein, 40 aa, Artificial Sequence
  Description of Artificial Sequence: Synthetic polypeptide
VWPNVFETSPHVIQAVMGALEGLRVAIGPCRMLQYCLQGL

SEQ ID NO: 9144 - protein, 40 aa, Artificial Sequence
  Description of Artificial Sequence: Synthetic polypeptide
WPNVFETSPHVIQAVMGALEGLRVAIGPCRMLQYCLQGLF

SEQ ID NO: 9145 - protein, 40 aa, Artificial Sequence
  Description of Artificial Sequence: Synthetic polypeptide
PNVFETSPHVIQAVMGALEGLRVAIGPCRMLQYCLQGLFH

SEQ ID NO: 9146 - protein, 40 aa, Artificial Sequence
  Description of Artificial Sequence: Synthetic polypeptide
HVIQAVMGALEGLRVAIGPCRMLQYCLQGLFHPARKVRDV

SEQ ID NO: 9147 - protein, 40 aa, Artificial Sequence
  Description of Artificial Sequence: Synthetic polypeptide
MQYCLQGLFHPARKVRDVYWKIYNSIYIGSQDALIAHYPR

SEQ ID NO: 9148 - protein, 40 aa, Artificial Sequence
  Description of Artificial Sequence: Synthetic polypeptide
QYCLQGLFHPARKVRDVYWKIYNSIYIGSQDALIAHYPRI

SEQ ID NO: 9149 - protein, 40 aa, Artificial Sequence
  Description of Artificial Sequence: Synthetic polypeptide
PKLNRENFPGVSWDSLPDELLLGIFSCLCLPELLKVSGVC

SEQ ID NO: 9150 - protein, 40 aa, Artificial Sequence
  Description of Artificial Sequence: Synthetic polypeptide
KLNRENFPGVSWDSLPDELLLGIFSCLCLPELLKVSGVCK

SEQ ID NO: 9151 - protein, 40 aa, Artificial Sequence
  Description of Artificial Sequence: Synthetic polypeptide
RENFPGVSWDSLPDELLLGIFSCLCLPELLKVSGVCKRWY

SEQ ID NO: 9152 - protein, 40 aa, Artificial Sequence
  Description of Artificial Sequence: Synthetic polypeptide
FPGVSWDSLPDELLLGIFSCLCLPELLKVSGVCKRWYRLA

SEQ ID NO: 9153 - protein, 40 aa, Artificial Sequence
  Description of Artificial Sequence: Synthetic polypeptide
VSWDSLPDELLLGIFSCLCLPELLKVSGVCKRWYRLASDE

SEQ ID NO: 9154 - protein, 40 aa, Artificial Sequence
  Description of Artificial Sequence: Synthetic polypeptide
SWDSLPDELLLGIFSCLCLPELLKVSGVCKRWYRLASDES

SEQ ID NO: 9155 - protein, 40 aa, Artificial Sequence
  Description of Artificial Sequence: Synthetic polypeptide
MGIFSCLCLPELLKVSGVCKRWYRLASDESLWQTLDLTGK

SEQ ID NO: 9156 - protein, 40 aa, Artificial Sequence
  Description of Artificial Sequence: Synthetic polypeptide
GIFSCLCLPELLKVSGVCKRWYRLASDESLWQTLDLTGKN

SEQ ID NO: 9157 - protein, 40 aa, Artificial Sequence
  Description of Artificial Sequence: Synthetic polypeptide
FSCLCLPELLKVSGVCKRWYRLASDESLWQTLDLTGKNLH

SEQ ID NO: 9158 - protein, 40 aa, Artificial Sequence
  Description of Artificial Sequence: Synthetic polypeptide
VCKRWYRLASDESLWQTLDLTGKNLHPDVTGRLLSQGVIA

SEQ ID NO: 9159 - protein, 40 aa, Artificial Sequence
  Description of Artificial Sequence: Synthetic polypeptide
KRWYRLASDESLWQTLDLTGKNLHPDVTGRLLSQGVIAFR

SEQ ID NO: 9160 - protein, 40 aa, Artificial Sequence
  Description of Artificial Sequence: Synthetic polypeptide
RWYRLASDESLWQTLDLTGKNLHPDVTGRLLSQGVIAFRC

SEQ ID NO: 9161 - protein, 40 aa, Artificial Sequence
  Description of Artificial Sequence: Synthetic polypeptide
ASDESLWQTLDLTGKNLHPDVTGRLLSQGVIAFRCPRSFM

SEQ ID NO: 9162 - protein, 40 aa, Artificial Sequence
  Description of Artificial Sequence: Synthetic polypeptide
MSQGVIAFRCPRSFMDQPLAEHFSPFRVQHMDLSNSVIEV

SEQ ID NO: 9163 - protein, 40 aa, Artificial Sequence
  Description of Artificial Sequence: Synthetic polypeptide
CSKLQNLSLEGLRLSDPIVNTLAKNSNLVRLNLSGCSGFS

SEQ ID NO: 9164 - protein, 40 aa, Artificial Sequence
  Description of Artificial Sequence: Synthetic polypeptide
SKLQNLSLEGLRLSDPIVNTLAKNSNLVRLNLSGCSGFSE

SEQ ID NO: 9165 - protein, 40 aa, Artificial Sequence
  Description of Artificial Sequence: Synthetic polypeptide
KLQNLSLEGLRLSDPIVNTLAKNSNLVRLNLSGCSGFSEF

SEQ ID NO: 9166 - protein, 40 aa, Artificial Sequence
  Description of Artificial Sequence: Synthetic polypeptide
QNLSLEGLRLSDPIVNTLAKNSNLVRLNLSGCSGFSEFAL

SEQ ID NO: 9167 - protein, 40 aa, Artificial Sequence
  Description of Artificial Sequence: Synthetic polypeptide
NLSLEGLRLSDPIVNTLAKNSNLVRLNLSGCSGFSEFALQ

SEQ ID NO: 9168 - protein, 40 aa, Artificial Sequence
  Description of Artificial Sequence: Synthetic polypeptide
LSLEGLRLSDPIVNTLAKNSNLVRLNLSGCSGFSEFALQT

SEQ ID NO: 9169 - protein, 40 aa, Artificial Sequence
  Description of Artificial Sequence: Synthetic polypeptide
SLEGLRLSDPIVNTLAKNSNLVRLNLSGCSGFSEFALQTL

SEQ ID NO: 9170 - protein, 40 aa, Artificial Sequence
  Description of Artificial Sequence: Synthetic polypeptide
MEGLRLSDPIVNTLAKNSNLVRLNLSGCSGFSEFALQTLL

SEQ ID NO: 9171 - protein, 40 aa, Artificial Sequence
  Description of Artificial Sequence: Synthetic polypeptide
EGLRLSDPIVNTLAKNSNLVRLNLSGCSGFSEFALQTLLS

SEQ ID NO: 9172 - protein, 40 aa, Artificial Sequence
  Description of Artificial Sequence: Synthetic polypeptide
LSDPIVNTLAKNSNLVRLNLSGCSGFSEFALQTLLSSCSR

SEQ ID NO: 9173 - protein, 40 aa, Artificial Sequence
  Description of Artificial Sequence: Synthetic polypeptide
PIVNTLAKNSNLVRLNLSGCSGFSEFALQTLLSSCSRLDE

SEQ ID NO: 9174 - protein, 40 aa, Artificial Sequence
  Description of Artificial Sequence: Synthetic polypeptide
KNSNLVRLNLSGCSGFSEFALQTLLSSCSRLDELNLSWCF

SEQ ID NO: 9175 - protein, 40 aa, Artificial Sequence
  Description of Artificial Sequence: Synthetic polypeptide
SNLVRLNLSGCSGFSEFALQTLLSSCSRLDELNLSWCFDF

SEQ ID NO: 9176 - protein, 40 aa, Artificial Sequence
  Description of Artificial Sequence: Synthetic polypeptide
SWCFDFTEKHVQVAVAHVSETITQLNLSGYRKNLQKSDLS

SEQ ID NO: 9177 - protein, 40 aa, Artificial Sequence
  Description of Artificial Sequence: Synthetic polypeptide
WCFDFTEKHVQVAVAHVSETITQLNLSGYRKNLQKSDLST

SEQ ID NO: 9178 - protein, 40 aa, Artificial Sequence
  Description of Artificial Sequence: Synthetic polypeptide
QKSDLSTLVRRCPNLVHLDLSDSVMLKNDCFQEFFQLNYL

SEQ ID NO: 9179 - protein, 40 aa, Artificial Sequence
  Description of Artificial Sequence: Synthetic polypeptide
MLKNDCFQEFFQLNYLQHLSLSRCYDIIPETLLELGEIPT

SEQ ID NO: 9180 - protein, 40 aa, Artificial Sequence
  Description of Artificial Sequence: Synthetic polypeptide
RCYDIIPETLLELGEIPTLKTLQVFGIVPDGTLQLLKEAL

SEQ ID NO: 9181 - protein, 40 aa, Artificial Sequence
  Description of Artificial Sequence: Synthetic polypeptide
YDIIPETLLELGEIPTLKTLQVFGIVPDGTLQLLKEALPH

SEQ ID NO: 9182 - protein, 40 aa, Artificial Sequence
  Description of Artificial Sequence: Synthetic polypeptide
DIIPETLLELGEIPTLKTLQVFGIVPDGTLQLLKEALPHL

SEQ ID NO: 9183 - protein, 40 aa, Artificial Sequence
  Description of Artificial Sequence: Synthetic polypeptide
GEQNGQEEKWCEKAVKSLVKKLKKTGRLDELEKAITTQNC

SEQ ID NO: 9184 - protein, 40 aa, Artificial Sequence
  Description of Artificial Sequence: Synthetic polypeptide
NGQEEKWCEKAVKSLVKKLKKTGRLDELEKAITTQNCNTK

SEQ ID NO: 9185 - protein, 40 aa, Artificial Sequence
  Description of Artificial Sequence: Synthetic polypeptide
AVKSLVKKLKKTGRLDELEKAITTQNCNTKCVTIPSTCSE

SEQ ID NO: 9186 - protein, 40 aa, Artificial Sequence
  Description of Artificial Sequence: Synthetic polypeptide
KAITTQNCNTKCVTIPSTCSEIWGLSTPNTIDQWDTTGLY

SEQ ID NO: 9187 - protein, 40 aa, Artificial Sequence
  Description of Artificial Sequence: Synthetic polypeptide
ITTQNCNTKCVTIPSTCSEIWGLSTPNTIDQWDTTGLYSF

SEQ ID NO: 9188 - protein, 40 aa, Artificial Sequence
  Description of Artificial Sequence: Synthetic polypeptide
CNTKCVTIPSTCSEIWGLSTPNTIDQWDTTGLYSFSEQTR

SEQ ID NO: 9189 - protein, 40 aa, Artificial Sequence
  Description of Artificial Sequence: Synthetic polypeptide
TKCVTIPSTCSEIWGLSTPNTIDQWDTTGLYSFSEQTRSL

SEQ ID NO: 9190 - protein, 40 aa, Artificial Sequence
  Description of Artificial Sequence: Synthetic polypeptide
KCVTIPSTCSEIWGLSTPNTIDQWDTTGLYSFSEQTRSLD

SEQ ID NO: 9191 - protein, 40 aa, Artificial Sequence
  Description of Artificial Sequence: Synthetic polypeptide
VTIPSTCSEIWGLSTPNTIDQWDTTGLYSFSEQTRSLDGR

SEQ ID NO: 9192 - protein, 40 aa, Artificial Sequence
  Description of Artificial Sequence: Synthetic polypeptide
IPSTCSEIWGLSTPNTIDQWDTTGLYSFSEQTRSLDGRLQ

SEQ ID NO: 9193 - protein, 40 aa, Artificial Sequence
  Description of Artificial Sequence: Synthetic polypeptide
PSTCSEIWGLSTPNTIDQWDTTGLYSFSEQTRSLDGRLQV

SEQ ID NO: 9194 - protein, 40 aa, Artificial Sequence
  Description of Artificial Sequence: Synthetic polypeptide
STCSEIWGLSTPNTIDQWDTTGLYSFSEQTRSLDGRLQVS

SEQ ID NO: 9195 - protein, 40 aa, Artificial Sequence
  Description of Artificial Sequence: Synthetic polypeptide
TCSEIWGLSTPNTIDQWDTTGLYSFSEQTRSLDGRLQVSH

SEQ ID NO: 9196 - protein, 40 aa, Artificial Sequence
  Description of Artificial Sequence: Synthetic polypeptide
CSEIWGLSTPNTIDQWDTTGLYSFSEQTRSLDGRLQVSHR

SEQ ID NO: 9197 - protein, 40 aa, Artificial Sequence
  Description of Artificial Sequence: Synthetic polypeptide
IDQWDTTGLYSFSEQTRSLDGRLQVSHRKGLPHVIYCRLW

SEQ ID NO: 9198 - protein, 40 aa, Artificial Sequence
  Description of Artificial Sequence: Synthetic polypeptide
QWDTTGLYSFSEQTRSLDGRLQVSHRKGLPHVIYCRLWRW

SEQ ID NO: 9199 - protein, 40 aa, Artificial Sequence
  Description of Artificial Sequence: Synthetic polypeptide
TTGLYSFSEQTRSLDGRLQVSHRKGLPHVIYCRLWRWPDL

SEQ ID NO: 9200 - protein, 40 aa, Artificial Sequence
  Description of Artificial Sequence: Synthetic polypeptide
GLYSFSEQTRSLDGRLQVSHRKGLPHVIYCRLWRWPDLHS

SEQ ID NO: 9201 - protein, 40 aa, Artificial Sequence
  Description of Artificial Sequence: Synthetic polypeptide
AIENCEYAFNLKKDEVCVNPYHYQRVETPVLPPVLVPRHT

SEQ ID NO: 9202 - protein, 40 aa, Artificial Sequence
  Description of Artificial Sequence: Synthetic polypeptide
NCEYAFNLKKDEVCVNPYHYQRVETPVLPPVLVPRHTEIL

SEQ ID NO: 9203 - protein, 40 aa, Artificial Sequence
  Description of Artificial Sequence: Synthetic polypeptide
RHTEILTELPPLDDYTHSIPENTNFPAGIEPQSNYIPETP

SEQ ID NO: 9204 - protein, 40 aa, Artificial Sequence
  Description of Artificial Sequence: Synthetic polypeptide
TEILTELPPLDDYTHSIPENTNFPAGIEPQSNYIPETPPP

SEQ ID NO: 9205 - protein, 40 aa, Artificial Sequence
  Description of Artificial Sequence: Synthetic polypeptide
PGYISEDGETSDQQLNQSMDTGSPAELSPTTLSPVNHSLD

SEQ ID NO: 9206 - protein, 40 aa, Artificial Sequence
  Description of Artificial Sequence: Synthetic polypeptide
EDGETSDQQLNQSMDTGSPAELSPTTLSPVNHSLDLQPVT

SEQ ID NO: 9207 - protein, 40 aa, Artificial Sequence
  Description of Artificial Sequence: Synthetic polypeptide
AELSPTTLSPVNHSLDLQPVTYSEPAFWCSIAYYELNQRV

SEQ ID NO: 9208 - protein, 40 aa, Artificial Sequence
  Description of Artificial Sequence: Synthetic polypeptide
TTLSPVNHSLDLQPVTYSEPAFWCSIAYYELNQRVGETFH

SEQ ID NO: 9209 - protein, 40 aa, Artificial Sequence
  Description of Artificial Sequence: Synthetic polypeptide
ASQPSLTVDGFTDPSNSERFCLGLLSNVNRNATVEMTRRH

SEQ ID NO: 9210 - protein, 40 aa, Artificial Sequence
  Description of Artificial Sequence: Synthetic polypeptide
TDPSNSERFCLGLLSNVNRNATVEMTRRHIGRGVRLYYIG

SEQ ID NO: 9211 - protein, 40 aa, Artificial Sequence
  Description of Artificial Sequence: Synthetic polypeptide
DPSNSERFCLGLLSNVNRNATVEMTRRHIGRGVRLYYIGG

SEQ ID NO: 9212 - protein, 40 aa, Artificial Sequence
  Description of Artificial Sequence: Synthetic polypeptide
SNSERFCLGLLSNVNRNATVEMTRRHIGRGVRLYYIGGEV

SEQ ID NO: 9213 - protein, 40 aa, Artificial Sequence
  Description of Artificial Sequence: Synthetic polypeptide
SERFCLGLLSNVNRNATVEMTRRHIGRGVRLYYIGGEVFA

SEQ ID NO: 9214 - protein, 40 aa, Artificial Sequence
  Description of Artificial Sequence: Synthetic polypeptide
ERFCLGLLSNVNRNATVEMTRRHIGRGVRLYYIGGEVFAE

SEQ ID NO: 9215 - protein, 40 aa, Artificial Sequence
  Description of Artificial Sequence: Synthetic polypeptide
GLLSNVNRNATVEMTRRHIGRGVRLYYIGGEVFAECLSDS

SEQ ID NO: 9216 - protein, 40 aa, Artificial Sequence
  Description of Artificial Sequence: Synthetic polypeptide
SNVNRNATVEMTRRHIGRGVRLYYIGGEVFAECLSDSAIF

SEQ ID NO: 9217 - protein, 40 aa, Artificial Sequence
  Description of Artificial Sequence: Synthetic polypeptide
NRNATVEMTRRHIGRGVRLYYIGGEVFAECLSDSAIFVQS

SEQ ID NO: 9218 - protein, 40 aa, Artificial Sequence
  Description of Artificial Sequence: Synthetic polypeptide
RNATVEMTRRHIGRGVRLYYIGGEVFAECLSDSAIFVQSP

SEQ ID NO: 9219 - protein, 40 aa, Artificial Sequence
  Description of Artificial Sequence: Synthetic polypeptide
TVEMTRRHIGRGVRLYYIGGEVFAECLSDSAIFVQSPNCN

SEQ ID NO: 9220 - protein, 40 aa, Artificial Sequence
  Description of Artificial Sequence: Synthetic polypeptide
VEMTRRHIGRGVRLYYIGGEVFAECLSDSAIFVQSPNCNQ

SEQ ID NO: 9221 - protein, 40 aa, Artificial Sequence
  Description of Artificial Sequence: Synthetic polypeptide
HIGRGVRLYYIGGEVFAECLSDSAIFVQSPNCNQRYGWHP

SEQ ID NO: 9222 - protein, 40 aa, Artificial Sequence
  Description of Artificial Sequence: Synthetic polypeptide
LYYIGGEVFAECLSDSAIFVQSPNCNQRYGWHPATVCKIP

SEQ ID NO: 9223 - protein, 40 aa, Artificial Sequence
  Description of Artificial Sequence: Synthetic polypeptide
CKIPPGCNLKIFNNQEFAALLAQSVNQGFEAVYQLTRMCT

SEQ ID NO: 9224 - protein, 40 aa, Artificial Sequence
  Description of Artificial Sequence: Synthetic polypeptide
PGCNLKIFNNQEFAALLAQSVNQGFEAVYQLTRMCTIRMS

SEQ ID NO: 9225 - protein, 40 aa, Artificial Sequence
  Description of Artificial Sequence: Synthetic polypeptide
FNNQEFAALLAQSVNQGFEAVYQLTRMCTIRMSFVKGWGA

SEQ ID NO: 9226 - protein, 40 aa, Artificial Sequence
  Description of Artificial Sequence: Synthetic polypeptide
AALLAQSVNQGFEAVYQLTRMCTIRMSFVKGWGAEYRRQT

SEQ ID NO: 9227 - protein, 40 aa, Artificial Sequence
  Description of Artificial Sequence: Synthetic polypeptide
TRMCTIRMSFVKGWGAEYRRQTVTSTPCWIELHLNGPLQW

SEQ ID NO: 9228 - protein, 40 aa, Artificial Sequence
  Description of Artificial Sequence: Synthetic polypeptide
MSFVKGWGAEYRRQTVTSTPCWIELHLNGPLQWLDKVLTQ

SEQ ID NO: 9229 - protein, 40 aa, Artificial Sequence
  Description of Artificial Sequence: Synthetic polypeptide
SITNTPTSNDACLSIVHSLMCHRQGGESETFAKRAIESLV

SEQ ID NO: 9230 - protein, 40 aa, Artificial Sequence
  Description of Artificial Sequence: Synthetic polypeptide
CLSIVHSLMCHRQGGESETFAKRAIESLVKKLKEKKDELD

SEQ ID NO: 9231 - protein, 40 aa, Artificial Sequence
  Description of Artificial Sequence: Synthetic polypeptide
IVHSLMCHRQGGESETFAKRAIESLVKKLKEKKDELDSLI

SEQ ID NO: 9232 - protein, 40 aa, Artificial Sequence
  Description of Artificial Sequence: Synthetic polypeptide
MCHRQGGESETFAKRAIESLVKKLKEKKDELDSLITAITT

SEQ ID NO: 9233 - protein, 40 aa, Artificial Sequence
  Description of Artificial Sequence: Synthetic polypeptide
CHRQGGESETFAKRAIESLVKKLKEKKDELDSLITAITTN

SEQ ID NO: 9234 - protein, 40 aa, Artificial Sequence
  Description of Artificial Sequence: Synthetic polypeptide
GESETFAKRAIESLVKKLKEKKDELDSLITAITTNGAHPS

SEQ ID NO: 9235 - protein, 40 aa, Artificial Sequence
  Description of Artificial Sequence: Synthetic polypeptide
ESETFAKRAIESLVKKLKEKKDELDSLITAITTNGAHPSK

SEQ ID NO: 9236 - protein, 40 aa, Artificial Sequence
  Description of Artificial Sequence: Synthetic polypeptide
SETFAKRAIESLVKKLKEKKDELDSLITAITTNGAHPSKC

SEQ ID NO: 9237 - protein, 40 aa, Artificial Sequence
  Description of Artificial Sequence: Synthetic polypeptide
AKRAIESLVKKLKEKKDELDSLITAITTNGAHPSKCVTIQ

SEQ ID NO: 9238 - protein, 40 aa, Artificial Sequence
  Description of Artificial Sequence: Synthetic polypeptide
KRAIESLVKKLKEKKDELDSLITAITTNGAHPSKCVTIQR

SEQ ID NO: 9239 - protein, 40 aa, Artificial Sequence
  Description of Artificial Sequence: Synthetic polypeptide
AIESLVKKLKEKKDELDSLITAITTNGAHPSKCVTIQRTL

SEQ ID NO: 9240 - protein, 40 aa, Artificial Sequence
  Description of Artificial Sequence: Synthetic polypeptide
TLDGRLQVAGRKGFPHVIYARLWRWPDLHKNELKHVKYCQ

SEQ ID NO: 9241 - protein, 40 aa, Artificial Sequence
  Description of Artificial Sequence: Synthetic polypeptide
VAGRKGFPHVIYARLWRWPDLHKNELKHVKYCQYAFDLKC

SEQ ID NO: 9242 - protein, 40 aa, Artificial Sequence
  Description of Artificial Sequence: Synthetic polypeptide
FPHVIYARLWRWPDLHKNELKHVKYCQYAFDLKCDSVCVN

SEQ ID NO: 9243 - protein, 40 aa, Artificial Sequence
  Description of Artificial Sequence: Synthetic polypeptide
IYARLWRWPDLHKNELKHVKYCQYAFDLKCDSVCVNPYHY

SEQ ID NO: 9244 - protein, 40 aa, Artificial Sequence
  Description of Artificial Sequence: Synthetic polypeptide
WRWPDLHKNELKHVKYCQYAFDLKCDSVCVNPYHYERVVS

SEQ ID NO: 9245 - protein, 40 aa, Artificial Sequence
  Description of Artificial Sequence: Synthetic polypeptide
WPDLHKNELKHVKYCQYAFDLKCDSVCVNPYHYERVVSPG

SEQ ID NO: 9246 - protein, 40 aa, Artificial Sequence
  Description of Artificial Sequence: Synthetic polypeptide
PDLHKNELKHVKYCQYAFDLKCDSVCVNPYHYERVVSPGI

SEQ ID NO: 9247 - protein, 40 aa, Artificial Sequence
  Description of Artificial Sequence: Synthetic polypeptide
LHKNELKHVKYCQYAFDLKCDSVCVNPYHYERVVSPGIDL

SEQ ID NO: 9248 - protein, 40 aa, Artificial Sequence
  Description of Artificial Sequence: Synthetic polypeptide
VKYCQYAFDLKCDSVCVNPYHYERVVSPGIDLSGLTLQSN

SEQ ID NO: 9249 - protein, 40 aa, Artificial Sequence
  Description of Artificial Sequence: Synthetic polypeptide
YCQYAFDLKCDSVCVNPYHYERVVSPGIDLSGLTLQSNAP

SEQ ID NO: 9250 - protein, 40 aa, Artificial Sequence
  Description of Artificial Sequence: Synthetic polypeptide
CQYAFDLKCDSVCVNPYHYERVVSPGIDLSGLTLQSNAPS

SEQ ID NO: 9251 - protein, 40 aa, Artificial Sequence
  Description of Artificial Sequence: Synthetic polypeptide
SPGIDLSGLTLQSNAPSSMMVKDEYVHDFEGQPSLSTEGH

SEQ ID NO: 9252 - protein, 40 aa, Artificial Sequence
  Description of Artificial Sequence: Synthetic polypeptide
IDLSGLTLQSNAPSSMMVKDEYVHDFEGQPSLSTEGHSIQ

SEQ ID NO: 9253 - protein, 40 aa, Artificial Sequence
  Description of Artificial Sequence: Synthetic polypeptide
SLSTEGHSIQTIQHPPSNRASTETYSTPALLAPSESNATS

SEQ ID NO: 9254 - protein, 40 aa, Artificial Sequence
  Description of Artificial Sequence: Synthetic polypeptide
PVASTSQPASILGGSHSEGLLQIASGPQPGQQQNGFTGQP

SEQ ID NO: 9255 - protein, 40 aa, Artificial Sequence
  Description of Artificial Sequence: Synthetic polypeptide
PGHYWPVHNELAFQPPISNHPAPEYWCSIAYFEMDVQVGE

SEQ ID NO: 9256 - protein, 40 aa, Artificial Sequence
  Description of Artificial Sequence: Synthetic polypeptide
YWPVHNELAFQPPISNHPAPEYWCSIAYFEMDVQVGETFK

SEQ ID NO: 9257 - protein, 40 aa, Artificial Sequence
  Description of Artificial Sequence: Synthetic polypeptide
ISNHPAPEYWCSIAYFEMDVQVGETFKVPSSCPIVTVDGY

SEQ ID NO: 9258 - protein, 40 aa, Artificial Sequence
  Description of Artificial Sequence: Synthetic polypeptide
NHPAPEYWCSIAYFEMDVQVGETFKVPSSCPIVTVDGYVD

SEQ ID NO: 9259 - protein, 40 aa, Artificial Sequence
  Description of Artificial Sequence: Synthetic polypeptide
HPAPEYWCSIAYFEMDVQVGETFKVPSSCPIVTVDGYVDP

SEQ ID NO: 9260 - protein, 40 aa, Artificial Sequence
  Description of Artificial Sequence: Synthetic polypeptide
PEYWCSIAYFEMDVQVGETFKVPSSCPIVTVDGYVDPSGG

SEQ ID NO: 9261 - protein, 40 aa, Artificial Sequence
  Description of Artificial Sequence: Synthetic polypeptide
EYWCSIAYFEMDVQVGETFKVPSSCPIVTVDGYVDPSGGD

SEQ ID NO: 9262 - protein, 40 aa, Artificial Sequence
  Description of Artificial Sequence: Synthetic polypeptide
YWCSIAYFEMDVQVGETFKVPSSCPIVTVDGYVDPSGGDR

SEQ ID NO: 9263 - protein, 40 aa, Artificial Sequence
  Description of Artificial Sequence: Synthetic polypeptide
CSIAYFEMDVQVGETFKVPSSCPIVTVDGYVDPSGGDRFC

SEQ ID NO: 9264 - protein, 40 aa, Artificial Sequence
  Description of Artificial Sequence: Synthetic polypeptide
YFEMDVQVGETFKVPSSCPIVTVDGYVDPSGGDRFCLGQL

SEQ ID NO: 9265 - protein, 40 aa, Artificial Sequence
  Description of Artificial Sequence: Synthetic polypeptide
EMDVQVGETFKVPSSCPIVTVDGYVDPSGGDRFCLGQLSN

SEQ ID NO: 9266 - protein, 40 aa, Artificial Sequence
  Description of Artificial Sequence: Synthetic polypeptide
SGGDRFCLGQLSNVHRTEAIERARLHIGKGVQLECKGEGD

SEQ ID NO: 9267 - protein, 40 aa, Artificial Sequence
  Description of Artificial Sequence: Synthetic polypeptide
TEAIERARLHIGKGVQLECKGEGDVWVRCLSDHAVFVQSY

SEQ ID NO: 9268 - protein, 40 aa, Artificial Sequence
  Description of Artificial Sequence: Synthetic polypeptide
EAIERARLHIGKGVQLECKGEGDVWVRCLSDHAVFVQSYY

SEQ ID NO: 9269 - protein, 40 aa, Artificial Sequence
  Description of Artificial Sequence: Synthetic polypeptide
IERARLHIGKGVQLECKGEGDVWVRCLSDHAVFVQSYYLD

SEQ ID NO: 9270 - protein, 40 aa, Artificial Sequence
  Description of Artificial Sequence: Synthetic polypeptide
ERARLHIGKGVQLECKGEGDVWVRCLSDHAVFVQSYYLDR

SEQ ID NO: 9271 - protein, 40 aa, Artificial Sequence
  Description of Artificial Sequence: Synthetic polypeptide
IGKGVQLECKGEGDVWVRCLSDHAVFVQSYYLDREAGRAP

SEQ ID NO: 9272 - protein, 40 aa, Artificial Sequence
  Description of Artificial Sequence: Synthetic polypeptide
ECKGEGDVWVRCLSDHAVFVQSYYLDREAGRAPGDAVHKI

SEQ ID NO: 9273 - protein, 40 aa, Artificial Sequence
  Description of Artificial Sequence: Synthetic polypeptide
LSDHAVFVQSYYLDREAGRAPGDAVHKIYPSAYIKVFDLR

SEQ ID NO: 9274 - protein, 40 aa, Artificial Sequence
  Description of Artificial Sequence: Synthetic polypeptide
DHAVFVQSYYLDREAGRAPGDAVHKIYPSAYIKVFDLRQC

SEQ ID NO: 9275 - protein, 40 aa, Artificial Sequence
  Description of Artificial Sequence: Synthetic polypeptide
HAVFVQSYYLDREAGRAPGDAVHKIYPSAYIKVFDLRQCH

SEQ ID NO: 9276 - protein, 40 aa, Artificial Sequence
  Description of Artificial Sequence: Synthetic polypeptide
FVQSYYLDREAGRAPGDAVHKIYPSAYIKVFDLRQCHRQM

SEQ ID NO: 9277 - protein, 40 aa, Artificial Sequence
  Description of Artificial Sequence: Synthetic polypeptide
VQSYYLDREAGRAPGDAVHKIYPSAYIKVFDLRQCHRQMQ

SEQ ID NO: 9278 - protein, 40 aa, Artificial Sequence
  Description of Artificial Sequence: Synthetic polypeptide
LDREAGRAPGDAVHKIYPSAYIKVFDLRQCHRQMQQQAAT

SEQ ID NO: 9279 - protein, 40 aa, Artificial Sequence
  Description of Artificial Sequence: Synthetic polypeptide
RAPGDAVHKIYPSAYIKVFDLRQCHRQMQQQAATAQAAAA

SEQ ID NO: 9280 - protein, 40 aa, Artificial Sequence
  Description of Artificial Sequence: Synthetic polypeptide
GDAVHKIYPSAYIKVFDLRQCHRQMQQQAATAQAAAAAQA

SEQ ID NO: 9281 - protein, 40 aa, Artificial Sequence
  Description of Artificial Sequence: Synthetic polypeptide
DAVHKIYPSAYIKVFDLRQCHRQMQQQAATAQAAAAAQAA

SEQ ID NO: 9282 - protein, 40 aa, Artificial Sequence
  Description of Artificial Sequence: Synthetic polypeptide
AVHKIYPSAYIKVFDLRQCHRQMQQQAATAQAAAAAQAAA

SEQ ID NO: 9283 - protein, 40 aa, Artificial Sequence
  Description of Artificial Sequence: Synthetic polypeptide
VHKIYPSAYIKVFDLRQCHRQMQQQAATAQAAAAAQAAAV

SEQ ID NO: 9284 - protein, 40 aa, Artificial Sequence
  Description of Artificial Sequence: Synthetic polypeptide
HKIYPSAYIKVFDLRQCHRQMQQQAATAQAAAAAQAAAVA

SEQ ID NO: 9285 - protein, 40 aa, Artificial Sequence
  Description of Artificial Sequence: Synthetic polypeptide
MQQQAATAQAAAAAQAAAVAGNIPGPGSVGGIAPAISLSA

SEQ ID NO: 9286 - protein, 40 aa, Artificial Sequence
  Description of Artificial Sequence: Synthetic polypeptide
AVAGNIPGPGSVGGIAPAISLSAAAGIGVDDLRRLCILRM

SEQ ID NO: 9287 - protein, 40 aa, Artificial Sequence
  Description of Artificial Sequence: Synthetic polypeptide
SVGGIAPAISLSAAAGIGVDDLRRLCILRMSFVKGWGPDY

SEQ ID NO: 9288 - protein, 40 aa, Artificial Sequence
  Description of Artificial Sequence: Synthetic polypeptide
GIGVDDLRRLCILRMSFVKGWGPDYPRQSIKETPCWIEIH

SEQ ID NO: 9289 - protein, 40 aa, Artificial Sequence
  Description of Artificial Sequence: Synthetic polypeptide
PRAPRCRAVRSLLRSHYREVLPLATFVRRLGPQGWRLVQR

SEQ ID NO: 9290 - protein, 40 aa, Artificial Sequence
  Description of Artificial Sequence: Synthetic polypeptide
PRCRAVRSLLRSHYREVLPLATFVRRLGPQGWRLVQRGDP

SEQ ID NO: 9291 - protein, 40 aa, Artificial Sequence
  Description of Artificial Sequence: Synthetic polypeptide
CRAVRSLLRSHYREVLPLATFVRRLGPQGWRLVQRGDPAA

SEQ ID NO: 9292 - protein, 40 aa, Artificial Sequence
  Description of Artificial Sequence: Synthetic polypeptide
RSLLRSHYREVLPLATFVRRLGPQGWRLVQRGDPAAFRAL

SEQ ID NO: 9293 - protein, 40 aa, Artificial Sequence
  Description of Artificial Sequence: Synthetic polypeptide
SLLRSHYREVLPLATFVRRLGPQGWRLVQRGDPAAFRALV

SEQ ID NO: 9294 - protein, 40 aa, Artificial Sequence
  Description of Artificial Sequence: Synthetic polypeptide
MLRSHYREVLPLATFVRRLGPQGWRLVQRGDPAAFRALVA

SEQ ID NO: 9295 - protein, 40 aa, Artificial Sequence
  Description of Artificial Sequence: Synthetic polypeptide
MRSHYREVLPLATFVRRLGPQGWRLVQRGDPAAFRALVAQ

SEQ ID NO: 9296 - protein, 40 aa, Artificial Sequence
  Description of Artificial Sequence: Synthetic polypeptide
RSHYREVLPLATFVRRLGPQGWRLVQRGDPAAFRALVAQC

SEQ ID NO: 9297 - protein, 40 aa, Artificial Sequence
  Description of Artificial Sequence: Synthetic polypeptide
SHYREVLPLATFVRRLGPQGWRLVQRGDPAAFRALVAQCL

SEQ ID NO: 9298 - protein, 40 aa, Artificial Sequence
  Description of Artificial Sequence: Synthetic polypeptide
HYREVLPLATFVRRLGPQGWRLVQRGDPAAFRALVAQCLV

SEQ ID NO: 9299 - protein, 40 aa, Artificial Sequence
  Description of Artificial Sequence: Synthetic polypeptide
EVLPLATFVRRLGPQGWRLVQRGDPAAFRALVAQCLVCVP

SEQ ID NO: 9300 - protein, 40 aa, Artificial Sequence
  Description of Artificial Sequence: Synthetic polypeptide
VLPLATFVRRLGPQGWRLVQRGDPAAFRALVAQCLVCVPW

SEQ ID NO: 9301 - protein, 40 aa, Artificial Sequence
  Description of Artificial Sequence: Synthetic polypeptide
MPLATFVRRLGPQGWRLVQRGDPAAFRALVAQCLVCVPWD

SEQ ID NO: 9302 - protein, 40 aa, Artificial Sequence
  Description of Artificial Sequence: Synthetic polypeptide
PLATFVRRLGPQGWRLVQRGDPAAFRALVAQCLVCVPWDA

SEQ ID NO: 9303 - protein, 40 aa, Artificial Sequence
  Description of Artificial Sequence: Synthetic polypeptide
MATFVRRLGPQGWRLVQRGDPAAFRALVAQCLVCVPWDAR

SEQ ID NO: 9304 - protein, 40 aa, Artificial Sequence
  Description of Artificial Sequence: Synthetic polypeptide
ATFVRRLGPQGWRLVQRGDPAAFRALVAQCLVCVPWDARP

SEQ ID NO: 9305 - protein, 40 aa, Artificial Sequence
  Description of Artificial Sequence: Synthetic polypeptide
FVRRLGPQGWRLVQRGDPAAFRALVAQCLVCVPWDARPPP

SEQ ID NO: 9306 - protein, 40 aa, Artificial Sequence
  Description of Artificial Sequence: Synthetic polypeptide
VRRLGPQGWRLVQRGDPAAFRALVAQCLVCVPWDARPPPA

SEQ ID NO: 9307 - protein, 40 aa, Artificial Sequence
  Description of Artificial Sequence: Synthetic polypeptide
RRLGPQGWRLVQRGDPAAFRALVAQCLVCVPWDARPPPAA

SEQ ID NO: 9308 - protein, 40 aa, Artificial Sequence
  Description of Artificial Sequence: Synthetic polypeptide
PQGWRLVQRGDPAAFRALVAQCLVCVPWDARPPPAAPSFR

SEQ ID NO: 9309 - protein, 40 aa, Artificial Sequence
  Description of Artificial Sequence: Synthetic polypeptide
RLVQRGDPAAFRALVAQCLVCVPWDARPPPAAPSFRQVSC

SEQ ID NO: 9310 - protein, 40 aa, Artificial Sequence
  Description of Artificial Sequence: Synthetic polypeptide
RQVSCLKELVARVLQRLCERGAKNVLAFGFALLDGARGGP

SEQ ID NO: 9311 - protein, 40 aa, Artificial Sequence
  Description of Artificial Sequence: Synthetic polypeptide
QVSCLKELVARVLQRLCERGAKNVLAFGFALLDGARGGPP

SEQ ID NO: 9312 - protein, 40 aa, Artificial Sequence
  Description of Artificial Sequence: Synthetic polypeptide
CLKELVARVLQRLCERGAKNVLAFGFALLDGARGGPPEAF

SEQ ID NO: 9313 - protein, 40 aa, Artificial Sequence
  Description of Artificial Sequence: Synthetic polypeptide
MKELVARVLQRLCERGAKNVLAFGFALLDGARGGPPEAFT

SEQ ID NO: 9314 - protein, 40 aa, Artificial Sequence
  Description of Artificial Sequence: Synthetic polypeptide
KELVARVLQRLCERGAKNVLAFGFALLDGARGGPPEAFTT

SEQ ID NO: 9315 - protein, 40 aa, Artificial Sequence
  Description of Artificial Sequence: Synthetic polypeptide
ARVLQRLCERGAKNVLAFGFALLDGARGGPPEAFTTSVRS

SEQ ID NO: 9316 - protein, 40 aa, Artificial Sequence
  Description of Artificial Sequence: Synthetic polypeptide
RVLQRLCERGAKNVLAFGFALLDGARGGPPEAFTTSVRSY

SEQ ID NO: 9317 - protein, 40 aa, Artificial Sequence
  Description of Artificial Sequence: Synthetic polypeptide
MCERGAKNVLAFGFALLDGARGGPPEAFTTSVRSYLPNTV

SEQ ID NO: 9318 - protein, 40 aa, Artificial Sequence
  Description of Artificial Sequence: Synthetic polypeptide
RGAKNVLAFGFALLDGARGGPPEAFTTSVRSYLPNTVTDA

SEQ ID NO: 9319 - protein, 40 aa, Artificial Sequence
  Description of Artificial Sequence: Synthetic polypeptide
PNTVTDALRGSGAWGLLLRRVGDDVLVHLLARCALFVLVA

SEQ ID NO: 9320 - protein, 40 aa, Artificial Sequence
  Description of Artificial Sequence: Synthetic polypeptide
NTVTDALRGSGAWGLLLRRVGDDVLVHLLARCALFVLVAP

SEQ ID NO: 9321 - protein, 40 aa, Artificial Sequence
  Description of Artificial Sequence: Synthetic polypeptide
MRGSGAWGLLLRRVGDDVLVHLLARCALFVLVAPSCAYQV

SEQ ID NO: 9322 - protein, 40 aa, Artificial Sequence
  Description of Artificial Sequence: Synthetic polypeptide
RGSGAWGLLLRRVGDDVLVHLLARCALFVLVAPSCAYQVC

SEQ ID NO: 9323 - protein, 40 aa, Artificial Sequence
  Description of Artificial Sequence: Synthetic polypeptide
GSGAWGLLLRRVGDDVLVHLLARCALFVLVAPSCAYQVCG

SEQ ID NO: 9324 - protein, 40 aa, Artificial Sequence
  Description of Artificial Sequence: Synthetic polypeptide
GAWGLLLRRVGDDVLVHLLARCALFVLVAPSCAYQVCGPP

SEQ ID NO: 9325 - protein, 40 aa, Artificial Sequence
  Description of Artificial Sequence: Synthetic polypeptide
AWGLLLRRVGDDVLVHLLARCALFVLVAPSCAYQVCGPPL

SEQ ID NO: 9326 - protein, 40 aa, Artificial Sequence
  Description of Artificial Sequence: Synthetic polypeptide
WGLLLRRVGDDVLVHLLARCALFVLVAPSCAYQVCGPPLY

SEQ ID NO: 9327 - protein, 40 aa, Artificial Sequence
  Description of Artificial Sequence: Synthetic polypeptide
VGDDVLVHLLARCALFVLVAPSCAYQVCGPPLYQLGAATQ

SEQ ID NO: 9328 - protein, 40 aa, Artificial Sequence
  Description of Artificial Sequence: Synthetic polypeptide
RRRLGCERAWNHSVREAGVPLGLPAPGARRRGGSASRSLP

SEQ ID NO: 9329 - protein, 40 aa, Artificial Sequence
  Description of Artificial Sequence: Synthetic polypeptide
PLPKRPRRGAAPEPERTPVGQGSWAHPGRTRGPSDRGFCV

SEQ ID NO: 9330 - protein, 40 aa, Artificial Sequence
  Description of Artificial Sequence: Synthetic polypeptide
ERTPVGQGSWAHPGRTRGPSDRGFCVVSPARPAEEATSLE

SEQ ID NO: 9331 - protein, 40 aa, Artificial Sequence
  Description of Artificial Sequence: Synthetic polypeptide
VGQGSWAHPGRTRGPSDRGFCVVSPARPAEEATSLEGALS

SEQ ID NO: 9332 - protein, 40 aa, Artificial Sequence
  Description of Artificial Sequence: Synthetic polypeptide
GSWAHPGRTRGPSDRGFCVVSPARPAEEATSLEGALSGTR

SEQ ID NO: 9333 - protein, 40 aa, Artificial Sequence
  Description of Artificial Sequence: Synthetic polypeptide
EQLRPSFLLSSLRPSLTGARRLVETIFLGSRPWMPGTPRR

SEQ ID NO: 9334 - protein, 40 aa, Artificial Sequence
  Description of Artificial Sequence: Synthetic polypeptide
GARRLVETIFLGSRPWMPGTPRRLPRLPQRYWQMRPLFLE

SEQ ID NO: 9335 - protein, 40 aa, Artificial Sequence
  Description of Artificial Sequence: Synthetic polypeptide
DTDPRRLVQLLRQHSSPWQVYGFVRACLRRLVPPGLWGSR

SEQ ID NO: 9336 - protein, 40 aa, Artificial Sequence
  Description of Artificial Sequence: Synthetic polypeptide
RLVQLLRQHSSPWQVYGFVRACLRRLVPPGLWGSRHNERR

SEQ ID NO: 9337 - protein, 40 aa, Artificial Sequence
  Description of Artificial Sequence: Synthetic polypeptide
QLLRQHSSPWQVYGFVRACLRRLVPPGLWGSRHNERRFLR

SEQ ID NO: 9338 - protein, 40 aa, Artificial Sequence
  Description of Artificial Sequence: Synthetic polypeptide
PPGLWGSRHNERRFLRNTKKFISLGKHAKLSLQELTWKMS

SEQ ID NO: 9339 - protein, 40 aa, Artificial Sequence
  Description of Artificial Sequence: Synthetic polypeptide
WLRRSPGVGCVPAAEHRLREEILAKFLHWLMSVYVVELLR

SEQ ID NO: 9340 - protein, 40 aa, Artificial Sequence
  Description of Artificial Sequence: Synthetic polypeptide
SPGVGCVPAAEHRLREEILAKFLHWLMSVYVVELLRSFFY

SEQ ID NO: 9341 - protein, 40 aa, Artificial Sequence
  Description of Artificial Sequence: Synthetic polypeptide
GVGCVPAAEHRLREEILAKFLHWLMSVYVVELLRSFFYVT

SEQ ID NO: 9342 - protein, 40 aa, Artificial Sequence
  Description of Artificial Sequence: Synthetic polypeptide
RLREEILAKFLHWLMSVYVVELLRSFFYVTETTFQKNRLF

SEQ ID NO: 9343 - protein, 40 aa, Artificial Sequence
  Description of Artificial Sequence: Synthetic polypeptide
EEILAKFLHWLMSVYVVELLRSFFYVTETTFQKNRLFFYR

SEQ ID NO: 9344 - protein, 40 aa, Artificial Sequence
  Description of Artificial Sequence: Synthetic polypeptide
ILAKFLHWLMSVYVVELLRSFFYVTETTFQKNRLFFYRKS

SEQ ID NO: 9345 - protein, 40 aa, Artificial Sequence
  Description of Artificial Sequence: Synthetic polypeptide
MMSVYVVELLRSFFYVTETTFQKNRLFFYRKSVWSKLQSI

SEQ ID NO: 9346 - protein, 40 aa, Artificial Sequence
  Description of Artificial Sequence: Synthetic polypeptide
SVYVVELLRSFFYVTETTFQKNRLFFYRKSVWSKLQSIGI

SEQ ID NO: 9347 - protein, 40 aa, Artificial Sequence
  Description of Artificial Sequence: Synthetic polypeptide
VYVVELLRSFFYVTETTFQKNRLFFYRKSVWSKLQSIGIR

SEQ ID NO: 9348 - protein, 40 aa, Artificial Sequence
  Description of Artificial Sequence: Synthetic polypeptide
YVVELLRSFFYVTETTFQKNRLFFYRKSVWSKLQSIGIRQ

SEQ ID NO: 9349 - protein, 40 aa, Artificial Sequence
  Description of Artificial Sequence: Synthetic polypeptide
VELLRSFFYVTETTFQKNRLFFYRKSVWSKLQSIGIRQHL

SEQ ID NO: 9350 - protein, 40 aa, Artificial Sequence
  Description of Artificial Sequence: Synthetic polypeptide
ELLRSFFYVTETTFQKNRLFFYRKSVWSKLQSIGIRQHLK

SEQ ID NO: 9351 - protein, 40 aa, Artificial Sequence
  Description of Artificial Sequence: Synthetic polypeptide
MLRSFFYVTETTFQKNRLFFYRKSVWSKLQSIGIRQHLKR

SEQ ID NO: 9352 - protein, 40 aa, Artificial Sequence
  Description of Artificial Sequence: Synthetic polypeptide
LRSFFYVTETTFQKNRLFFYRKSVWSKLQSIGIRQHLKRV

SEQ ID NO: 9353 - protein, 40 aa, Artificial Sequence
  Description of Artificial Sequence: Synthetic polypeptide
YVTETTFQKNRLFFYRKSVWSKLQSIGIRQHLKRVQLREL

SEQ ID NO: 9354 - protein, 40 aa, Artificial Sequence
  Description of Artificial Sequence: Synthetic polypeptide
VTETTFQKNRLFFYRKSVWSKLQSIGIRQHLKRVQLRELS

SEQ ID NO: 9355 - protein, 40 aa, Artificial Sequence
  Description of Artificial Sequence: Synthetic polypeptide
SRLRFIPKPDGLRPIVNMDYVVGARTFRREKRAERLTSRV

SEQ ID NO: 9356 - protein, 40 aa, Artificial Sequence
  Description of Artificial Sequence: Synthetic polypeptide
VVGARTFRREKRAERLTSRVKALFSVLNYERARRPGLLGA

SEQ ID NO: 9357 - protein, 40 aa, Artificial Sequence
  Description of Artificial Sequence: Synthetic polypeptide
GARTFRREKRAERLTSRVKALFSVLNYERARRPGLLGASV

SEQ ID NO: 9358 - protein, 40 aa, Artificial Sequence
  Description of Artificial Sequence: Synthetic polypeptide
RTFRREKRAERLTSRVKALFSVLNYERARRPGLLGASVLG

SEQ ID NO: 9359 - protein, 40 aa, Artificial Sequence
  Description of Artificial Sequence: Synthetic polypeptide
TFRREKRAERLTSRVKALFSVLNYERARRPGLLGASVLGL

SEQ ID NO: 9360 - protein, 40 aa, Artificial Sequence
  Description of Artificial Sequence: Synthetic polypeptide
FRREKRAERLTSRVKALFSVLNYERARRPGLLGASVLGLD

SEQ ID NO: 9361 - protein, 40 aa, Artificial Sequence
  Description of Artificial Sequence: Synthetic polypeptide
REKRAERLTSRVKALFSVLNYERARRPGLLGASVLGLDDI

SEQ ID NO: 9362 - protein, 40 aa, Artificial Sequence
  Description of Artificial Sequence: Synthetic polypeptide
KRAERLTSRVKALFSVLNYERARRPGLLGASVLGLDDIHR

SEQ ID NO: 9363 - protein, 40 aa, Artificial Sequence
  Description of Artificial Sequence: Synthetic polypeptide
ERLTSRVKALFSVLNYERARRPGLLGASVLGLDDIHRAWR

SEQ ID NO: 9364 - protein, 40 aa, Artificial Sequence
  Description of Artificial Sequence: Synthetic polypeptide
RLTSRVKALFSVLNYERARRPGLLGASVLGLDDIHRAWRT

SEQ ID NO: 9365 - protein, 40 aa, Artificial Sequence
  Description of Artificial Sequence: Synthetic polypeptide
TSRVKALFSVLNYERARRPGLLGASVLGLDDIHRAWRTFV

SEQ ID NO: 9366 - protein, 40 aa, Artificial Sequence
  Description of Artificial Sequence: Synthetic polypeptide
SRVKALFSVLNYERARRPGLLGASVLGLDDIHRAWRTFVL

SEQ ID NO: 9367 - protein, 40 aa, Artificial Sequence
  Description of Artificial Sequence: Synthetic polypeptide
RVKALFSVLNYERARRPGLLGASVLGLDDIHRAWRTFVLR

SEQ ID NO: 9368 - protein, 40 aa, Artificial Sequence
  Description of Artificial Sequence: Synthetic polypeptide
VKALFSVLNYERARRPGLLGASVLGLDDIHRAWRTFVLRV

SEQ ID NO: 9369 - protein, 40 aa, Artificial Sequence
  Description of Artificial Sequence: Synthetic polypeptide
KALFSVLNYERARRPGLLGASVLGLDDIHRAWRTFVLRVR

SEQ ID NO: 9370 - protein, 40 aa, Artificial Sequence
  Description of Artificial Sequence: Synthetic polypeptide
ALFSVLNYERARRPGLLGASVLGLDDIHRAWRTFVLRVRA

SEQ ID NO: 9371 - protein, 40 aa, Artificial Sequence
  Description of Artificial Sequence: Synthetic polypeptide
FSVLNYERARRPGLLGASVLGLDDIHRAWRTFVLRVRAQD

SEQ ID NO: 9372 - protein, 40 aa, Artificial Sequence
  Description of Artificial Sequence: Synthetic polypeptide
SVLNYERARRPGLLGASVLGLDDIHRAWRTFVLRVRAQDP

SEQ ID NO: 9373 - protein, 40 aa, Artificial Sequence
  Description of Artificial Sequence: Synthetic polypeptide
VLNYERARRPGLLGASVLGLDDIHRAWRTFVLRVRAQDPP

SEQ ID NO: 9374 - protein, 40 aa, Artificial Sequence
  Description of Artificial Sequence: Synthetic polypeptide
YERARRPGLLGASVLGLDDIHRAWRTFVLRVRAQDPPPEL

SEQ ID NO: 9375 - protein, 40 aa, Artificial Sequence
  Description of Artificial Sequence: Synthetic polypeptide
ERARRPGLLGASVLGLDDIHRAWRTFVLRVRAQDPPPELY

SEQ ID NO: 9376 - protein, 40 aa, Artificial Sequence
  Description of Artificial Sequence: Synthetic polypeptide
ARRPGLLGASVLGLDDIHRAWRTFVLRVRAQDPPPELYFV

SEQ ID NO: 9377 - protein, 40 aa, Artificial Sequence
  Description of Artificial Sequence: Synthetic polypeptide
LLGASVLGLDDIHRAWRTFVLRVRAQDPPPELYFVKVDVT

SEQ ID NO: 9378 - protein, 40 aa, Artificial Sequence
  Description of Artificial Sequence: Synthetic polypeptide
GASVLGLDDIHRAWRTFVLRVRAQDPPPELYFVKVDVTGA

SEQ ID NO: 9379 - protein, 40 aa, Artificial Sequence
  Description of Artificial Sequence: Synthetic polypeptide
ASVLGLDDIHRAWRTFVLRVRAQDPPPELYFVKVDVTGAY

SEQ ID NO: 9380 - protein, 40 aa, Artificial Sequence
  Description of Artificial Sequence: Synthetic polypeptide
DIHRAWRTFVLRVRAQDPPPELYFVKVDVTGAYDTIPQDR

SEQ ID NO: 9381 - protein, 40 aa, Artificial Sequence
  Description of Artificial Sequence: Synthetic polypeptide
MRQFVAHLQETSPLRDAVVIEQSSSLNEASSGLFDVFLRF

SEQ ID NO: 9382 - protein, 40 aa, Artificial Sequence
  Description of Artificial Sequence: Synthetic polypeptide
EASSGLFDVFLRFMCHHAVRIRGKSYVQCQGIPQGSILST

SEQ ID NO: 9383 - protein, 40 aa, Artificial Sequence
  Description of Artificial Sequence: Synthetic polypeptide
TAFVQMPAHGLFPWCGLLLDTRTLEVQSDYSSYARTSIRA

SEQ ID NO: 9384 - protein, 40 aa, Artificial Sequence
  Description of Artificial Sequence: Synthetic polypeptide
GFKAGRNMRRKLFGVLRLKCHSLFLDLQVNSLQTVCTNIY

SEQ ID NO: 9385 - protein, 40 aa, Artificial Sequence
  Description of Artificial Sequence: Synthetic polypeptide
KAGRNMRRKLFGVLRLKCHSLFLDLQVNSLQTVCTNIYKI

SEQ ID NO: 9386 - protein, 40 aa, Artificial Sequence
  Description of Artificial Sequence: Synthetic polypeptide
MRRKLFGVLRLKCHSLFLDLQVNSLQTVCTNIYKILLLQA

SEQ ID NO: 9387 - protein, 40 aa, Artificial Sequence
  Description of Artificial Sequence: Synthetic polypeptide
MRLKCHSLFLDLQVNSLQTVCTNIYKILLLQAYRFHACVL

SEQ ID NO: 9388 - protein, 40 aa, Artificial Sequence
  Description of Artificial Sequence: Synthetic polypeptide
HACVLQLPFHQQVWKNPTFFLRVISDTASLCYSILKAKNA

SEQ ID NO: 9389 - protein, 40 aa, Artificial Sequence
  Description of Artificial Sequence: Synthetic polypeptide
SLGAKGAAGPLPSEAVQWLCHQAFLLKLTRHRVTYVPLLG

SEQ ID NO: 9390 - protein, 40 aa, Artificial Sequence
  Description of Artificial Sequence: Synthetic polypeptide
YVPLLGSLRTAQTQLSRKLPGTTLTALEAAANPALPSDFK

SEQ ID NO: 9391 - protein, 40 aa, Artificial Sequence
  Description of Artificial Sequence: Synthetic polypeptide
MHIVLWTRIASTIPPHVQKSVNNDMIVTDNNGAVKFPQLC

SEQ ID NO: 9392 - protein, 40 aa, Artificial Sequence
  Description of Artificial Sequence: Synthetic polypeptide
HVQKSVNNDMIVTDNNGAVKFPQLCKFCDVRFSTCDNQKS

SEQ ID NO: 9393 - protein, 40 aa, Artificial Sequence
  Description of Artificial Sequence: Synthetic polypeptide
VQKSVNNDMIVTDNNGAVKFPQLCKFCDVRFSTCDNQKSC

SEQ ID NO: 9394 - protein, 40 aa, Artificial Sequence
  Description of Artificial Sequence: Synthetic polypeptide
AVKFPQLCKFCDVRFSTCDNQKSCMSNCSITSICEKPQEV

SEQ ID NO: 9395 - protein, 40 aa, Artificial Sequence
  Description of Artificial Sequence: Synthetic polypeptide
QLCKFCDVRFSTCDNQKSCMSNCSITSICEKPQEVCVAVW

SEQ ID NO: 9396 - protein, 40 aa, Artificial Sequence
  Description of Artificial Sequence: Synthetic polypeptide
NDENITLETVCHDPKLPYHDFILEDAASPKCIMKEKKKPG

SEQ ID NO: 9397 - protein, 40 aa, Artificial Sequence
  Description of Artificial Sequence: Synthetic polypeptide
CIMKEKKKPGETFFMCSCSSDECNDNIIFSEEYNTSNPDL

SEQ ID NO: 9398 - protein, 40 aa, Artificial Sequence
  Description of Artificial Sequence: Synthetic polypeptide
IMKEKKKPGETFFMCSCSSDECNDNIIFSEEYNTSNPDLL

SEQ ID NO: 9399 - protein, 40 aa, Artificial Sequence
  Description of Artificial Sequence: Synthetic polypeptide
MKEKKKPGETFFMCSCSSDECNDNIIFSEEYNTSNPDLLL

SEQ ID NO: 9400 - protein, 40 aa, Artificial Sequence
  Description of Artificial Sequence: Synthetic polypeptide
KEKKKPGETFFMCSCSSDECNDNIIFSEEYNTSNPDLLLV

SEQ ID NO: 9401 - protein, 40 aa, Artificial Sequence
  Description of Artificial Sequence: Synthetic polypeptide
KKKPGETFFMCSCSSDECNDNIIFSEEYNTSNPDLLLVIF

SEQ ID NO: 9402 - protein, 40 aa, Artificial Sequence
  Description of Artificial Sequence: Synthetic polypeptide
TGISLLPPLGVAISVIIIFYCYRVNRQQKLSSTWETGKTR

SEQ ID NO: 9403 - protein, 40 aa, Artificial Sequence
  Description of Artificial Sequence: Synthetic polypeptide
PIELDTLVGKGRFAEVYKAKLKQNTSEQFETVAVKIFPYE

SEQ ID NO: 9404 - protein, 40 aa, Artificial Sequence
  Description of Artificial Sequence: Synthetic polypeptide
VAVKIFPYEEYASWKTEKDIFSDINLKHENILQFLTAEER

SEQ ID NO: 9405 - protein, 40 aa, Artificial Sequence
  Description of Artificial Sequence: Synthetic polypeptide
HRDLKSSNILVKNDLTCCLCDFGLSLRLDPTLSVDDLANS

SEQ ID NO: 9406 - protein, 40 aa, Artificial Sequence
  Description of Artificial Sequence: Synthetic polypeptide
LKSSNILVKNDLTCCLCDFGLSLRLDPTLSVDDLANSGQV

SEQ ID NO: 9407 - protein, 40 aa, Artificial Sequence
  Description of Artificial Sequence: Synthetic polypeptide
CCLCDFGLSLRLDPTLSVDDLANSGQVGTARYMAPEVLES

SEQ ID NO: 9408 - protein, 40 aa, Artificial Sequence
  Description of Artificial Sequence: Synthetic polypeptide
LSLRLDPTLSVDDLANSGQVGTARYMAPEVLESRMNLENV

SEQ ID NO: 9409 - protein, 40 aa, Artificial Sequence
  Description of Artificial Sequence: Synthetic polypeptide
DPTLSVDDLANSGQVGTARYMAPEVLESRMNLENVESFKQ

SEQ ID NO: 9410 - protein, 40 aa, Artificial Sequence
  Description of Artificial Sequence: Synthetic polypeptide
VYSMALVLWEMTSRCNAVGEVKDYEPPFGSKVREHPCVES

SEQ ID NO: 9411 - protein, 40 aa, Artificial Sequence
  Description of Artificial Sequence: Synthetic polypeptide
TSRCNAVGEVKDYEPPFGSKVREHPCVESMKDNVLRDRGR

SEQ ID NO: 9412 - protein, 40 aa, Artificial Sequence
  Description of Artificial Sequence: Synthetic polypeptide
NAVGEVKDYEPPFGSKVREHPCVESMKDNVLRDRGRPEIP

SEQ ID NO: 9413 - protein, 40 aa, Artificial Sequence
  Description of Artificial Sequence: Synthetic polypeptide
GEVKDYEPPFGSKVREHPCVESMKDNVLRDRGRPEIPSFW

SEQ ID NO: 9414 - protein, 40 aa, Artificial Sequence
  Description of Artificial Sequence: Synthetic polypeptide
PSFWLNHQGIQMVCETLTECWDHDPEARLTAQCVAERFSE

SEQ ID NO: 9415 - protein, 40 aa, Artificial Sequence
  Description of Artificial Sequence: Synthetic polypeptide
WLNHQGIQMVCETLTECWDHDPEARLTAQCVAERFSELEH

SEQ ID NO: 9416 - protein, 40 aa, Artificial Sequence
  Description of Artificial Sequence: Synthetic polypeptide
HQGIQMVCETLTECWDHDPEARLTAQCVAERFSELEHLDR

SEQ ID NO: 9417 - protein, 40 aa, Artificial Sequence
  Description of Artificial Sequence: Synthetic polypeptide
QMVCETLTECWDHDPEARLTAQCVAERFSELEHLDRLSGR

SEQ ID NO: 9418 - protein, 40 aa, Artificial Sequence
  Description of Artificial Sequence: Synthetic polypeptide
APAAPTPAAPAPAPSWPLSSSVPSQKTYQGSYGFRLGFLH

SEQ ID NO: 9419 - protein, 40 aa, Artificial Sequence
  Description of Artificial Sequence: Synthetic polypeptide
PAAPTPAAPAPAPSWPLSSSVPSQKTYQGSYGFRLGFLHS

SEQ ID NO: 9420 - protein, 40 aa, Artificial Sequence
  Description of Artificial Sequence: Synthetic polypeptide
PTPAAPAPAPSWPLSSSVPSQKTYQGSYGFRLGFLHSGTA

SEQ ID NO: 9421 - protein, 40 aa, Artificial Sequence
  Description of Artificial Sequence: Synthetic polypeptide
APAPAPSWPLSSSVPSQKTYQGSYGFRLGFLHSGTAKSVT

SEQ ID NO: 9422 - protein, 40 aa, Artificial Sequence
  Description of Artificial Sequence: Synthetic polypeptide
PAPSWPLSSSVPSQKTYQGSYGFRLGFLHSGTAKSVTCTY

SEQ ID NO: 9423 - protein, 40 aa, Artificial Sequence
  Description of Artificial Sequence: Synthetic polypeptide
APSWPLSSSVPSQKTYQGSYGFRLGFLHSGTAKSVTCTYS

SEQ ID NO: 9424 - protein, 40 aa, Artificial Sequence
  Description of Artificial Sequence: Synthetic polypeptide
WPLSSSVPSQKTYQGSYGFRLGFLHSGTAKSVTCTYSPAL

SEQ ID NO: 9425 - protein, 40 aa, Artificial Sequence
  Description of Artificial Sequence: Synthetic polypeptide
DSDGLAPPQHLIRVEGNLRVEYLDDRNTFRHSVVVPYEPP

SEQ ID NO: 9426 - protein, 40 aa, Artificial Sequence
  Description of Artificial Sequence: Synthetic polypeptide
DGLAPPQHLIRVEGNLRVEYLDDRNTFRHSVVVPYEPPEV

SEQ ID NO: 9427 - protein, 40 aa, Artificial Sequence
  Description of Artificial Sequence: Synthetic polypeptide
YMCNSSCMGGMNRRPILTIITLEDSSGNLLGRNSFEVRVC

SEQ ID NO: 9428 - protein, 40 aa, Artificial Sequence
  Description of Artificial Sequence: Synthetic polypeptide
CNSSCMGGMNRRPILTIITLEDSSGNLLGRNSFEVRVCAC

SEQ ID NO: 9429 - protein, 40 aa, Artificial Sequence
  Description of Artificial Sequence: Synthetic polypeptide
SCMGGMNRRPILTIITLEDSSGNLLGRNSFEVRVCACPGR

SEQ ID NO: 9430 - protein, 40 aa, Artificial Sequence
  Description of Artificial Sequence: Synthetic polypeptide
MGGMNRRPILTIITLEDSSGNLLGRNSFEVRVCACPGRDR

SEQ ID NO: 9431 - protein, 40 aa, Artificial Sequence
  Description of Artificial Sequence: Synthetic polypeptide
GGMNRRPILTIITLEDSSGNLLGRNSFEVRVCACPGRDRR

SEQ ID NO: 9432 - protein, 40 aa, Artificial Sequence
  Description of Artificial Sequence: Synthetic polypeptide
HELPPGSTKRALPNNTSSSPQPKKKPLDGEYFTLQIRGRE

SEQ ID NO: 9433 - protein, 40 aa, Artificial Sequence
  Description of Artificial Sequence: Synthetic polypeptide
EEDGGEESGAEESGPEESGPEELGAEEEMEAGRPRPVLRS

SEQ ID NO: 9434 - protein, 40 aa, Artificial Sequence
  Description of Artificial Sequence: Synthetic polypeptide
PSLNVDGQPIFANITLPVYTLKERCLQVVRSLVKPENYRR

SEQ ID NO: 9435 - protein, 40 aa, Artificial Sequence
  Description of Artificial Sequence: Synthetic polypeptide
DGQPIFANITLPVYTLKERCLQVVRSLVKPENYRRLDIVR

SEQ ID NO: 9436 - protein, 40 aa, Artificial Sequence
  Description of Artificial Sequence: Synthetic polypeptide
QPIFANITLPVYTLKERCLQVVRSLVKPENYRRLDIVRSL

SEQ ID NO: 9437 - protein, 40 aa, Artificial Sequence
  Description of Artificial Sequence: Synthetic polypeptide
NITLPVYTLKERCLQVVRSLVKPENYRRLDIVRSLYEDLE

SEQ ID NO: 9438 - protein, 40 aa, Artificial Sequence
  Description of Artificial Sequence: Synthetic polypeptide
LQVVRSLVKPENYRRLDIVRSLYEDLEDHPNVQKDLERLT

SEQ ID NO: 9439 - protein, 40 aa, Artificial Sequence
  Description of Artificial Sequence: Synthetic polypeptide
VKPENYRRLDIVRSLYEDLEDHPNVQKDLERLTQERIAHQ

SEQ ID NO: 9440 - protein, 40 aa, Artificial Sequence
  Description of Artificial Sequence: Synthetic polypeptide
ENYRRLDIVRSLYEDLEDHPNVQKDLERLTQERIAHQRMG

SEQ ID NO: 9441 - protein, 40 aa, Artificial Sequence
  Description of Artificial Sequence: Synthetic polypeptide
GQQPPPQPAPQGQGQPPSQPPQGQGPPSGPGQPAPAATQA

SEQ ID NO: 9442 - protein, 40 aa, Artificial Sequence
  Description of Artificial Sequence: Synthetic polypeptide
QQPPPQPAPQGQGQPPSQPPQGQGPPSGPGQPAPAATQAA

SEQ ID NO: 9443 - protein, 40 aa, Artificial Sequence
  Description of Artificial Sequence: Synthetic polypeptide
QPPPQPAPQGQGQPPSQPPQGQGPPSGPGQPAPAATQAAP

SEQ ID NO: 9444 - protein, 40 aa, Artificial Sequence
  Description of Artificial Sequence: Synthetic polypeptide
QPAPQGQGQPPSQPPQGQGPPSGPGQPAPAATQAAPQAPP

SEQ ID NO: 9445 - protein, 40 aa, Artificial Sequence
  Description of Artificial Sequence: Synthetic polypeptide
APQGQGQPPSQPPQGQGPPSGPGQPAPAATQAAPQAPPAG

SEQ ID NO: 9446 - protein, 40 aa, Artificial Sequence
  Description of Artificial Sequence: Synthetic polypeptide
QGQGQPPSQPPQGQGPPSGPGQPAPAATQAAPQAPPAGHQ

SEQ ID NO: 9447 - protein, 40 aa, Artificial Sequence
  Description of Artificial Sequence: Synthetic polypeptide
GQGQPPSQPPQGQGPPSGPGQPAPAATQAAPQAPPAGHQI

SEQ ID NO: 9448 - protein, 40 aa, Artificial Sequence
  Description of Artificial Sequence: Synthetic polypeptide
QGQPPSQPPQGQGPPSGPGQPAPAATQAAPQAPPAGHQIV

SEQ ID NO: 9449 - protein, 40 aa, Artificial Sequence
  Description of Artificial Sequence: Synthetic polypeptide
PPSQPPQGQGPPSGPGQPAPAATQAAPQAPPAGHQIVHVR

SEQ ID NO: 9450 - protein, 40 aa, Artificial Sequence
  Description of Artificial Sequence: Synthetic polypeptide
QGQGPPSGPGQPAPAATQAAPQAPPAGHQIVHVRGDSETD

SEQ ID NO: 9451 - protein, 40 aa, Artificial Sequence
  Description of Artificial Sequence: Synthetic polypeptide
GQGPPSGPGQPAPAATQAAPQAPPAGHQIVHVRGDSETDL

SEQ ID NO: 9452 - protein, 40 aa, Artificial Sequence
  Description of Artificial Sequence: Synthetic polypeptide
ASLQLGAVSPGTLTPTGVVSGPAATPTAQHLRQSSFEIPD

SEQ ID NO: 9453 - protein, 40 aa, Artificial Sequence
  Description of Artificial Sequence: Synthetic polypeptide
LRQSSFEIPDDVPLPAGWEMAKTSSGQRYFLNHIDQTTTW

SEQ ID NO: 9454 - protein, 40 aa, Artificial Sequence
  Description of Artificial Sequence: Synthetic polypeptide
VQQNMMNSASGPLPDGWEQAMTQDGEIYYINHKNKTTSWL

SEQ ID NO: 9455 - protein, 40 aa, Artificial Sequence
  Description of Artificial Sequence: Synthetic polypeptide
NQRISQSAPVKQPPPLAPQSPQGGVMGGSNSNQQQQMRLQ

SEQ ID NO: 9456 - protein, 40 aa, Artificial Sequence
  Description of Artificial Sequence: Synthetic polypeptide
QNRFPDYLEAIPGTNVDLGTLEGDGMNIEGEELMPSLQEA

SEQ ID NO: 9457 - protein, 40 aa, Artificial Sequence
  Description of Artificial Sequence: Synthetic polypeptide
FPDYLEAIPGTNVDLGTLEGDGMNIEGEELMPSLQEALSS

SEQ ID NO: 9458 - protein, 40 aa, Artificial Sequence
  Description of Artificial Sequence: Synthetic polypeptide
PDYLEAIPGTNVDLGTLEGDGMNIEGEELMPSLQEALSSD

SEQ ID NO: 9459 - protein, 40 aa, Artificial Sequence
  Description of Artificial Sequence: Synthetic polypeptide
NIEGEELMPSLQEALSSDILNDMESVLAATKLDKESFLTW

SEQ ID NO: 9460 - protein, 40 aa, Artificial Sequence
  Description of Artificial Sequence: Synthetic polypeptide
FLDKFNHEAEDLFYQSSLASWNYNTNITEENVQNMNNAGD

SEQ ID NO: 9461 - protein, 40 aa, Artificial Sequence
  Description of Artificial Sequence: Synthetic polypeptide
FLKEQSTLAQMYPLQEIQNLTVKLQLQALQQNGSSVLSED

SEQ ID NO: 9462 - protein, 40 aa, Artificial Sequence
  Description of Artificial Sequence: Synthetic polypeptide
FLKVKNQMILFGEEDVRVANLKPRISFNFFVTAPKNVSDI

SEQ ID NO: 9463 - protein, 40 aa, Artificial Sequence
  Description of Artificial Sequence: Synthetic polypeptide
FFVSVGLPNMTQGFWENSMLTDPGNVQKAVCHPTAWDLGK

SEQ ID NO: 9464 - protein, 81 aa, Artificial Sequence
  Description of Artificial Sequence: Synthetic polypeptide
VTAAQSTIEEQAKTFLDKFNHEAEDLFYQSSLASWNYNTNITEENVQNMNNAGDKWSAFLKEQSTLAQMYPLQEIQNLTVK

SEQ ID NO: 9465 - protein, 44 aa, Artificial Sequence
  Description of Artificial Sequence: Synthetic polypeptide
IEEQAKTFLDKFNHEAEDLFYQSSLASWNYNTNITWDLGKGDFR

SEQ ID NO: 9466 - protein, 125 aa, Artificial Sequence
  Description of Artificial Sequence: Synthetic polypeptide
IEEQAKTFLDKFNHEAEDLFYQSSLASWNYNTNITEENVQNMNNAGDKWSAFLKEQSTLAQMYPLQEIQNLTVKLQLQALQQNGSMTQGFWENSMLTDPGNVQKAVCHPTAWDLGKGDFRILMCT

SEQ ID NO: 9467 - protein, 141 aa, Artificial Sequence
  Description of Artificial Sequence: Synthetic polypeptide
IEEQAKTFLDKFNHEAEDLFYQSSLASWNYNTNITEENVQNMNNAGDKWSAFLKEQSTLAQMYPLQEIQNLTVKLDPGNVQKAVCHPTAWDLGKGDFRILMCTKVTMDDFLTAHHEMGHIQYDMAYAAQPFLLRNGANEGF

SEQ ID NO: 9468 - protein, 87 aa, Artificial Sequence
  Description of Artificial Sequence: Synthetic polypeptide
AAQSTIEEQAKTFLDKFNHEAEDLFYQSSLASWNYNTNITGGSGSGSMTQGFWENSMLTDPGNVQKAVCHPTAWDLGKGDFRILMCT

SEQ ID NO: 9469 - protein, 40 aa, Artificial Sequence
  Description of Artificial Sequence: Synthetic polypeptide
VTAAQSTIEEQAKTFLDKFNHEAEDLFYQSSLASWNYNTN

SEQ ID NO: 9470 - protein, 40 aa, Artificial Sequence
  Description of Artificial Sequence: Synthetic polypeptide
TEENVQNMNNAGDKWSAFLKEQSTLAQMYPLQEIQNLTVK

SEQ ID NO: 9471 - protein, 40 aa, Artificial Sequence
  Description of Artificial Sequence: Synthetic polypeptide
EGIDLVTDEAEASKFVEEYDRTSQVVWNEYAEANWNYNTN

SEQ ID NO: 9472 - protein, 40 aa, Artificial Sequence
  Description of Artificial Sequence: Synthetic polypeptide
TTETSKILLQKNMQIANHTLKYGTQARKFDVNQLQNTTIK

SEQ ID NO: 9473 - protein, 40 aa, Artificial Sequence
  Description of Artificial Sequence: Synthetic polypeptide
QHGYEAGSVALHVEKLPNEPNRLLILHGFLDENVHFFHTN

SEQ ID NO: 9474 - protein, 45 aa, Artificial Sequence
  Description of Artificial Sequence: Synthetic polypeptide
LVSQLIRAGKPYQLQIYPNERHSIRCPESGEHYEVTLLHFLQEYL

SEQ ID NO: 9475 - protein, 40 aa, Artificial Sequence
  Description of Artificial Sequence: Synthetic polypeptide
DHSAIPVINRAQIINDAFNLASAHKVPVTLALNNTLFLIE

SEQ ID NO: 9476 - protein, 40 aa, Artificial Sequence
  Description of Artificial Sequence: Synthetic polypeptide
YFKLMFDRSEVYGPMKNYLKKQVTPLFIHFRNNTNNWREI

SEQ ID NO: 9477 - protein, 40 aa, Artificial Sequence
  Description of Artificial Sequence: Synthetic polypeptide
DNLEHYKNSTVMARAEYFRNVDYLLIHGTADDNVHFQNSA

SEQ ID NO: 9478 - protein, 40 aa, Artificial Sequence
  Description of Artificial Sequence: Synthetic polypeptide
QVDFQAMWYSDQNHGLSGLSTNHLYTHMTHFLKQCFSLSD

SEQ ID NO: 9479 - protein, 40 aa, Artificial Sequence
  Description of Artificial Sequence: Synthetic polypeptide
DNLDHYRNSTVMSRAENFKQVEYLLIHGTADDNVHFQQSA

SEQ ID NO: 9480 - protein, 40 aa, Artificial Sequence
  Description of Artificial Sequence: Synthetic polypeptide
GVDFQAMWYTDEDHGIASSTAHQHIYTHMSHFIKQCFSLP

SEQ ID NO: 9481 - protein, 40 aa, Artificial Sequence
  Description of Artificial Sequence: Synthetic polypeptide
IGFKLGVRPSQGGEAPREVTSDSGSIVVSGLTPGVEYVYT

SEQ ID NO: 9482 - protein, 40 aa, Artificial Sequence
  Description of Artificial Sequence: Synthetic polypeptide
PGLEYNVSVYTVKDDKESVPISDTIIPEVPQLTDLSFVDI

SEQ ID NO: 9483 - protein, 78 aa, Artificial Sequence
  Description of Artificial Sequence: Synthetic polypeptide
KFFVVNTDSLSSVTNATSIQITAPASMLIGDHYLCDVTWATQERISLQWLRRIQNYSVMDICDYDESSGRWNCLVARQ

SEQ ID NO: 9484 - protein, 80 aa, Artificial Sequence
  Description of Artificial Sequence: Synthetic polypeptide
QNYDADQKFGFCPMAAHEEICTTNEGVMYRIGDQWDKQHDMGHMMRCTCVGNGRGEWTCIAYSQLRDQCIVDDITYNVND

SEQ ID NO: 9485 - protein, 80 aa, Artificial Sequence
  Description of Artificial Sequence: Synthetic polypeptide
RIFIIDTTYPAYVGPQEVPVPAMIASSDYYFSWLTWVTDERVCLQWLKRVQNVSVLSICDFREDWQTWDCPKTQEHIEES

SEQ ID NO: 9486 - protein, 50 aa, Artificial Sequence
  Description of Artificial Sequence: Synthetic polypeptide
LVTYRENSLLFDPLSSSSSNKERVVTVIAHELAHQWFGNLVTIEWWNDLW

SEQ ID NO: 9487 - protein, 100 aa, Artificial Sequence
  Description of Artificial Sequence: Synthetic polypeptide
TFKMSEIMIDAEGRIIDVIDKELIQPFEILFEGVEYIARAGWTPEGKYAWSILLDRSQTRLQIVLISPELFIPVEDDVMERQRLIESVPDSVTPLIIYEE

SEQ ID NO: 9488 - protein, 100 aa, Artificial Sequence
  Description of Artificial Sequence: Synthetic polypeptide
ALKLAEFQTDSQGKIVSTQEKELVQPFSSLFPKVEYIARAGWTRDGKYAWAMFLDRPQQWLQLVLLPPALFIPSTENEEQRLASARAVPRNVQPYVVYEE

SEQ ID NO: 9489 - protein, 40 aa, Artificial Sequence
  Description of Artificial Sequence: Synthetic polypeptide
AFVRRALHRRYGDRYINLRGPIPAHLLGDMWAQSWENIYD

SEQ ID NO: 9490 - protein, 9 aa, Artificial Sequence
  Description of Artificial Sequence: Synthetic polypeptide
RKKRRQRRR

SEQ ID NO: 9491 - protein, 16 aa, Artificial Sequence
  Description of Artificial Sequence: Synthetic polypeptide
RQIKIWFQNRRMKWKK

SEQ ID NO: 9492 - protein, 21 aa, Artificial Sequence
  Description of Artificial Sequence: Synthetic polypeptide
TRSSRAGLQFPVGRVHRLLRK

SEQ ID NO: 9493 - protein, 26 aa, Artificial Sequence
  Description of Artificial Sequence: Synthetic polypeptide
GWTLNSAGYLLGKINKALAALAKKIL

SEQ ID NO: 9494 - protein, 18 aa, Artificial Sequence
  Description of Artificial Sequence: Synthetic polypeptide
KLALKLALKALKAALKLA

SEQ ID NO: 9495 - protein, 16 aa, Artificial Sequence
  Description of Artificial Sequence: Synthetic polypeptide
AAVALLPAVLLALLAP

SEQ ID NO: 9496 - protein, 10 aa, Artificial Sequence
  Description of Artificial Sequence: Synthetic polypeptide
VPMLKPMLKE

SEQ ID NO: 9497 - protein, 28 aa, Artificial Sequence
  Description of Artificial Sequence: Synthetic polypeptide
MANLGYWLLALFVTMWTDVGLCKKRPKP

SEQ ID NO: 9498 - protein, 18 aa, Artificial Sequence
  Description of Artificial Sequence: Synthetic polypeptide
LLIILRRRIRKQAHAHSK

SEQ ID NO: 9499 - protein, 21 aa, Artificial Sequence
  Description of Artificial Sequence: Synthetic polypeptide
KETWWETWWTEWSQPKKKRKV

SEQ ID NO: 9500 - protein, 18 aa, Artificial Sequence
  Description of Artificial Sequence: Synthetic polypeptide
RGGRLSYSRRRFSTSTGR

SEQ ID NO: 9501 - protein, 15 aa, Artificial Sequence
  Description of Artificial Sequence: Synthetic polypeptide
SDLWEMMMVSLACQY

SEQ ID NO: 9502 - protein, 12 aa, Artificial Sequence
  Description of Artificial Sequence: Synthetic polypeptide
TSPLNIHNGQKL

SEQ ID NO: 9503 - protein, 8 aa, Artificial Sequence
  Description of Artificial Sequence: Consensus sequence
  MISC_FEATURE (1)..(1): X is a basic amino acid
  MISC_FEATURE (2)..(4): X is a an alpha-helix enhancing amino acid
  MISC_FEATURE (5)..(5): X is a basic amino acid
  MISC_FEATURE (6)..(7): X is a an alpha-helix enhancing amino acid
  MISC_FEATURE (8)..(8): X is a basic amino acid
XXXXXXXX

SEQ ID NO: 9504 - protein, 8 aa, Artificial Sequence
  Description of Artificial Sequence: Consensus sequence
  MISC_FEATURE (1)..(1): X is a basic amino acid
  MISC_FEATURE (2)..(3): X is a an alpha-helix enhancing amino acid
  MISC_FEATURE (4)..(5): X is a basic amino acid
  MISC_FEATURE (6)..(7): X is a an alpha-helix enhancing amino acid
  MISC_FEATURE (8)..(8): X is a basic amino acid
XXXXXXXX

SEQ ID NO: 9505 - protein, 7 aa, Artificial Sequence
  Description of Artificial Sequence: Synthetic polypeptide
KKRPKPG

SEQ ID NO: 9506 - protein, 5 aa, Artificial Sequence
  Description of Artificial Sequence: Synthetic polypeptide
GGGGS

SEQ ID NO: 9507 - protein, 12 aa, Artificial Sequence
  Description of Artificial Sequence: Synthetic polypeptide
GKSSGSGSESKS

SEQ ID NO: 9508 - protein, 14 aa, Artificial Sequence
  Description of Artificial Sequence: Synthetic polypeptide
GSTSGSGKSSEGKG

SEQ ID NO: 9509 - protein, 18 aa, Artificial Sequence
  Description of Artificial Sequence: Synthetic polypeptide
GSTSGSGKSSEGSGSTKG

SEQ ID NO: 9510 - protein, 18 aa, Artificial Sequence
  Description of Artificial Sequence: Synthetic polypeptide
GSTSGSGKPGSGEGSTKG

SEQ ID NO: 9511 - protein, 14 aa, Artificial Sequence
  Description of Artificial Sequence: Synthetic polypeptide
EGKSSGSGSESKEF

SEQ ID NO: 9512 - DNA, 30 bp, Artificial Sequence
  Description of Artificial Sequence: Primer
ggctaggtaagcttgatatcggccaccatg

SEQ ID NO: 9513 - DNA, 30 bp, Artificial Sequence
  Description of Artificial Sequence: Primer
ggcggcactgtttaacaagcccgtcagtag

SEQ ID NO: 9514 - DNA, 53 bp, Artificial Sequence
  Description of Artificial Sequence: Primer
acactctttccctacacgacgctcttccgatctgcttgatatcggccaccatg

SEQ ID NO: 9515 - DNA, 57 bp, Artificial Sequence
  Description of Artificial Sequence: Primer
gactggagttcagacgtgtgctcttccgatctcactgtttaacaagcccgtcagtag

SEQ ID NO: 9516 - DNA, 22 bp, Artificial Sequence
  Description of Artificial Sequence: Primer
tgacggttctgggagcggttct

SEQ ID NO: 9517 - DNA, 22 bp, Artificial Sequence
  Description of Artificial Sequence: Primer
gttcgctgccggacccacttcc

SEQ ID NO: 9518 - DNA, 55 bp, Artificial Sequence
  Description of Artificial Sequence: Primer
acactctttccctacacgacgctcttccgatcttgacggttctgggagcggttct

SEQ ID NO: 9519 - DNA, 54 bp, Artificial Sequence
  Description of Artificial Sequence: Primer
gactggagttcagacgtgtgctcttccgatctgttcgctgccggacccacttcc

SEQ ID NO: 9520 - DNA, 21 bp, Artificial Sequence
  Description of Artificial Sequence: Primer
ttctcaagcctcagacagtgg

SEQ ID NO: 9521 - protein, 60 aa, Artificial Sequence
  Description of Artificial Sequence: Synthetic polypeptide
GRKKRRQRRRPPQGSGSGSMEAPNQALLRILKETEFKKIKVLGSGAFGTVYKGLWIPEGE

SEQ ID NO: 9522 - protein, 60 aa, Artificial Sequence
  Description of Artificial Sequence: Synthetic polypeptide
GRKKRRQRRRPPQGSGSGSMRNGMSLHDCLMKALKVRGLQPECCAVFRLLHEHKGKKARL

SEQ ID NO: 9523 - protein, 41 aa, Artificial Sequence
  Description of Artificial Sequence: Synthetic polypeptide
GRKKRRQRRRPPQGSGSGSDYKDHDGDYKDHDIDYKDDDDK

SEQ ID NO: 9524 - protein, 41 aa, Artificial Sequence
  Description of Artificial Sequence: Synthetic polypeptide
MIDDLIRDQGFRGDGGSTTGLSATPPASLPGSLTNVKALQK

SEQ ID NO: 9525 - protein, 41 aa, Artificial Sequence
  Description of Artificial Sequence: Synthetic polypeptide
MDDLIRDQGFRGDGGSTTGLSATPPASLPGSLTNVKALQKS

SEQ ID NO: 9526 - protein, 41 aa, Artificial Sequence
  Description of Artificial Sequence: Synthetic polypeptide
MEAPNQALLRILKETEFKKIKVLGSGAFGTVYKGLWIPEGE

SEQ ID NO: 9527 - protein, 41 aa, Artificial Sequence
  Description of Artificial Sequence: Synthetic polypeptide
MLRILKETEFKKIKVLGSGAFGTVYKGLWIPEGEKVKIPVA

SEQ ID NO: 9528 - protein, 41 aa, Artificial Sequence
  Description of Artificial Sequence: Synthetic polypeptide
MTSTVRCMHLHEKRVVSGSRDATLRVWDIETGQCLHVLMGH

SEQ ID NO: 9529 - protein, 41 aa, Artificial Sequence
  Description of Artificial Sequence: Synthetic polypeptide
MRRVVSGAYDFMVKVWDPETETCLHTLQGHTNRVYSLQFDG

SEQ ID NO: 9530 - protein, 41 aa, Artificial Sequence
  Description of Artificial Sequence: Synthetic polypeptide
MRNGMSLHDCLMKALKVRGLQPECCAVFRLLHEHKGKKARL

SEQ ID NO: 9531 - protein, 41 aa, Artificial Sequence
  Description of Artificial Sequence: Synthetic polypeptide
MLHDCLMKALKVRGLQPECCAVFRLLHEHKGKKARLDWNTD

SEQ ID NO: 9532 - protein, 41 aa, Artificial Sequence
  Description of Artificial Sequence: Synthetic polypeptide
MIQNHFVDEYDPTIEDSYRKQVVIDGETCLLDILDTAGKEE

SEQ ID NO: 9533 - protein, 41 aa, Artificial Sequence
  Description of Artificial Sequence: Synthetic polypeptide
MFVDEYDPTIEDSYRKQVVIDGETCLLDILDTAGKEEYSAM

SEQ ID NO: 9534 - protein, 41 aa, Artificial Sequence
  Description of Artificial Sequence: Synthetic polypeptide
MPTIEDSYRKQVVIDGETCLLDILDTAGKEEYSAMRDQYMR

SEQ ID NO: 9535 - protein, 41 aa, Artificial Sequence
  Description of Artificial Sequence: Synthetic polypeptide
MRARAPISNYIMLADTDKIKSFEEDLKTYKAIEKILRNKCS

SEQ ID NO: 9536 - protein, 41 aa, Artificial Sequence
  Description of Artificial Sequence: Synthetic polypeptide
METSAKTRQGVDDAFYTLVREIRKHKEKMSKDGKKKKKKSK

SEQ ID NO: 9537 - protein, 41 aa, Artificial Sequence
  Description of Artificial Sequence: Synthetic polypeptide
METLVRPKPLLLKLLKSVGAQKDTYTMKEVLFYLGQYIMTK

SEQ ID NO: 9538 - protein, 41 aa, Artificial Sequence
  Description of Artificial Sequence: Synthetic polypeptide
MKDAFYKNIVKKGYLLKKGKGKRWKNLYFILEGSDAQLIYF

SEQ ID NO: 9539 - DNA, 1440 bp, Homo sapiens
  CDS (1)..(1440)
atgagcgacgtggctattgtgaaggagggttggctgcacaaacgaggggagtacatcaagacctggcggccacgctacttcctcctcaagaatgatggcaccttcattggctacaaggagcggccgcaggatgtggaccaacgtgaggctcccctcaacaacttctctgtggcgcagtgccagctgatgaagacggagcggccccggcccaacaccttcatcatccgctgcctgcagtggaccactgtcatcgaacgcaccttccatgtggagactcctgaggagcgggaggagtggacaaccgccatccagactgtggctgacggcctcaagaagcaggaggaggaggagatggacttccggtcgggctcacccagtgacaactcaggggctgaagagatggaggtgtccctggccaagcccaagcaccgcgtgaccatgaacgagtttgagtacctgaagctgctgggcaagggcactttcggcaaggtgatcctggtgaaggagaaggccacaggccgctactacgccatgaagatcctcaagaaggaagtcatcgtggccaaggacgaggtggcccacacactcaccgagaaccgcgtcctgcagaactccaggcaccccttcctcacagccctgaagtactctttccagacccacgaccgcctctgctttgtcatggagtacgccaacgggggcgagctgttcttccacctgtcccgggagcgtgtgttctccgaggaccgggcccgcttctatggcgctgagattgtgtcagccctggactacctgcactcggagaagaacgtggtgtaccgggacctcaagctggagaacctcatgctggacaaggacgggcacattaagatcacagacttcgggctgtgcaaggaggggatcaaggacggtgccaccatgaagaccttttgcggcacacctgagtacctggcccccgaggtgctggaggacaatgactacggccgtgcagtggactggtgggggctgggcgtggtcatgtacgagatgatgtgcggtcgcctgcccttctacaaccaggaccatgagaagctttttgagctcatcctcatggaggagatccgcttcccgcgcacgcttggtcccgaggccaagtccttgctttcagggctgctcaagaaggaccccaagcagaggcttggcgggggctccgaggacgccaaggagatcatgcagcatcgcttctttgccggtatcgtgtggcagcacgtgtacgagaagaagctcagcccacccttcaagccccaggtcacgtcggagactgacaccaggtattttgatgaggagttcacggcccagatgatcaccatcacaccacctgaccaagatgacagcatggagtgtgtggacagcgagcgcaggccccacttcccccagttctcctactcggccagcggcacggcc

SEQ ID NO: 9540 - protein, 480 aa, Homo sapiens [sequence omitted]

SEQ ID NO: 9541 - DNA, 2763 bp, Homo sapiens
  CDS (1)..(2763)
atggaagtgcagttagggctgggaagggtctaccctcggccgccgtccaagacctaccgaggagctttccagaatctgttccagagcgtgcgcgaagtgatccagaacccgggccccaggcacccagaggccgcgagcgcagcacctcccggcgccagtttgctgctgctgcagcagcagcagcagcagcagcagcagcagcagcagcagcagcagcagcagcagcagcagcagcagcaagagactagccccaggcagcagcagcagcagcagggtgaggatggttctccccaagcccatcgtagaggccccacaggctacctggtcctggatgaggaacagcaaccttcacagccgcagtcggccctggagtgccaccccgagagaggttgcgtcccagagcctggagccgccgtggccgccagcaaggggctgccgcagcagctgccagcacctccggacgaggatgactcagctgccccatccacgttgtccctgctgggccccactttccccggcttaagcagctgctccgctgaccttaaagacatcctgagcgaggccagcaccatgcaactccttcagcaacagcagcaggaagcagtatccgaaggcagcagcagcgggagagcgagggaggcctcgggggctcccacttcctccaaggacaattacttagggggcacttcgaccatttctgacaacgccaaggagttgtgtaaggcagtgtcggtgtccatgggcctgggtgtggaggcgttggagcatctgagtccaggggaacagcttcggggggattgcatgtacgccccacttttgggagttccacccgctgtgcgtcccactccttgtgccccattggccgaatgcaaaggttctctgctagacgacagcgcaggcaagagcactgaagatactgctgagtattcccctttcaagggaggttacaccaaagggctagaaggcgagagcctaggctgctctggcagcgctgcagcagggagctccgggacacttgaactgccgtctaccctgtctctctacaagtccggagcactggacgaggcagctgcgtaccagagtcgcgactactacaactttccactggctctggccggaccgccgccccctccgccgcctccccatccccacgctcgcatcaagctggagaacccgctggactacggcagcgcctgggcggctgcggcggcgcagtgccgctatggggacctggcgagcctgcatggcgcgggtgcagcgggacccggttctgggtcaccctcagccgccgcttcctcatcctggcacactctcttcacagccgaagaaggccagttgtatggaccgtgtggtggtggtgggggtggtggcggcggcggcggcggcggcggcggcggcggcggcggcggcggcggcggcgaggcgggagctgtagccccctacggctacactcggccccctcaggggctggcgggccaggaaagcgacttcaccgcacctgatgtgtggtaccctggcggcatggtgagcagagtgccctatcccagtcccacttgtgtcaaaagcgaaatgggcccctggatggatagctactccggaccttacggggacatgcgtttggagactgccagggaccatgttttgcccattgactattactttccaccccagaagacctgcctgatctgtggagatgaagcttctgggtgtcactatggagctctcacatgtggaagctgcaaggtcttcttcaaaagagccgctgaagggaaacagaagtacctgtgcgccagcagaaatgattgcactattgataaattccgaaggaaaaattgtccatcttgtcgtcttcggaaatgttatgaagcagggatgactctgggagcccggaagctgaagaaacttggtaatctgaaactacaggaggaaggagaggcttccagcaccaccagccccactgaggagacaacccagaagctgacagtgtcacacattgaaggctatgaatgtcagcccatctttctgaatgtcctggaagccattgagccaggtgtagtgtgtgctggacacgacaacaaccagcccgactcctttgcagccttgctctctagcctcaatgaactgggagagagacagcttgtacacgtggtcaagtgggccaaggccttgcctggcttccgcaacttacacgtggacgaccagatggctgtcattcagtactcctggatggggctcatggtgtttgccatgggctggcgatccttcaccaatgtcaactccaggatgctctacttcgcccctgatctggttttcaatgagtaccgcatgcacaagtcccggatgtacagccagtgtgtccgaatgaggcacctctctcaagagtttggatggctccaaatcaccccccaggaattcctgtgcatgaaagcactgctactcttcagcattattccagtggatgggctgaaaaatcaaaaattctttgatgaacttcgaatgaactacatcaaggaactcgatcgtatcattgcatgcaaaagaaaaaatcccacatcctgctcaagacgcttctaccagctcaccaagctcctggactccgtgcagcctattgcgagagagctgcatcagttcacttttgacctgctaatcaagtcacacatggtgagcgtggactttccggaaatgatggcagagatcatctctgtgcaagtgcccaagatcctttctgggaaagtcaagcccatctatttccacacccagtga

SEQ ID NO: 9542 - protein, 920 aa, Homo sapiens
MEVQLGLGRVYPRPPSKTYRGAFQNLFQSVREVIQNPGPRHPEAASAAPPGASLLLLQQQQQQQQQQQQQQQQQQQQQQQETSPRQQQQQQGEDGSPQAHRRGPTGYLVLDEEQQPSQPQSALECHPERGCVPEPGAAVAASKGLPQQLPAPPDEDDSAAPSTLSLLGPTFPGLSSCSADLKDILSEASTMQLLQQQQQEAVSEGSSSGRAREASGAPTSSKDNYLGGTSTISDNAKELCKAVSVSMGLGVEALEHLSPGEQLRGDCMYAPLLGVPPAVRPTPCAPLAECKGSLLDDSAGKSTEDTAEYSPFKGGYTKGLEGESLGCSGSAAAGSSGTLELPSTLSLYKSGALDEAAAYQSRDYYNFPLALAGPPPPPPPPHPHARIKLENPLDYGSAWAAAAAQCRYGDLASLHGAGAAGPGSGSPSAAASSSWHTLFTAEEGQLYGPCGGGGGGGGGGGGGGGGGGGGGGGEAGAVAPYGYTRPPQGLAGQESDFTAPDVWYPGGMVSRVPYPSPTCVKSEMGPWMDSYSGPYGDMRLETARDHVLPIDYYFPPQKTCLICGDEASGCHYGALTCGSCKVFFKRAAEGKQKYLCASRNDCTIDKFRRKNCPSCRLRKCYEAGMTLGARKLKKLGNLKLQEEGEASSTTSPTEETTQKLTVSHIEGYECQPIFLNVLEAIEPGVVCAGHDNNQPDSFAALLSSLNELGERQLVHVVKWAKALPGFRNLHVDDQMAVIQYSWMGLMVFAMGWRSFTNVNSRMLYFAPDLVFNEYRMHKSRMYSQCVRMRHLSQEFGWLQITPQEFLCMKALLLFSIIPVDGLKNQKFFDELRMNYIKELDRIIACKRKNPTSCSRRFYQLTKLLDSVQPIARELHQFTFDLLIKSHMVSVDFPEMMAEIISVQVPKILSGKVKPIYFHTQ

SEQ ID NO: 9543 - DNA, 1821 bp, Homo sapiens
  CDS (1)..(1821)
atggagccaccacggggcccccctgccaatggggccgagccatcccgggcagtgggcaccgtcaaagtatacctgcccaacaagcaacgcacggtggtgactgtccgggatggcatgagtgtctacgactctctagacaaggccctgaaggtgcggggtctaaatcaggactgctgtgtggtctaccgactcatcaagggacgaaagacggtcactgcctgggacacagccattgctcccctggatggcgaggagctcattgtcgaggtccttgaagatgtcccgctgaccatgcacaattttgtacggaagaccttcttcagcctggcgttctgtgacttctgccttaagtttctgttccatggcttccgttgccaaacctgtggctacaagttccaccagcattgttcctccaaggtccccacagtctgtgttgacatgagtaccaaccgccaacagttctaccacagtgtccaggatttgtccggaggctccagacagcatgaggctccctcgaaccgccccctgaatgagttgctaaccccccagggtcccagcccccgcacccagcactgtgacccggagcacttccccttccctgccccagccaatgcccccctacagcgcatccgctccacgtccactcccaacgtccatatggtcagcaccacggcccccatggactccaacctcatccagctcactggccagagtttcagcactgatgctgccggtagtagaggaggtagtgatggaaccccccgggggagccccagcccagccagcgtgtcctcggggaggaagtccccacattccaagtcaccagcagagcagcgcgagcggaagtccttggccgatgacaagaagaaagtgaagaacctggggtaccgggactcaggctattactgggaggtaccacccagtgaggtgcagctgctgaagaggatcgggacgggctcgtttggcaccgtgtttcgagggcggtggcatggcgatgtggccgtgatggtgctcaaggtgtcccagcccacagctgagcaggcccaggctttcaagaatgagatgcaggtgctcaggaagacgcgacatgtcaacatcttgctgtttatgggcttcatgacccggccgggatttgccatcatcacacagtggtgtgagggctccagcctctaccatcacctgcatgtggccgacacacgcttcgacatggtccagctcatcgacgtggcccggcagactgcccagggcatggactacctccatgccaagaacatcatccaccgagatctcaagtctaacaacatcttcctacatgaggggctcacggtgaagatcggtgactttggcttggccacagtgaagactcgatggagcggggcccagcccttggagcagccctcaggatctgtgctgtggatggcagctgaggtgatccgtatgcaggacccgaacccctacagcttccagtcagacgtctatgcctacggggttgtgctctacgagcttatgactggctcactgccttacagccacattggctgccgtgaccagattatctttatggtgggccgtggctatctgtccccggacctcagcaaaatctccagcaactgccccaaggccatgcggcgcctgctgtctgactgcctcaagttccagcgggaggagcggcccctcttcccccagatcctggccacaattgagctgctgcaacggtcactccccaagattgagcggagtgcctcggaaccctccttgcaccgcacccaggccgatgagttgcctgcctgcctactcagcgcagcccgccttgtgccttag

SEQ ID NO: 9544 - protein, 606 aa, Homo sapiens
MEPPRGPPANGAEPSRAVGTVKVYLPNKQRTVVTVRDGMSVYDSLDKALKVRGLNQDCCVVYRLIKGRKTVTAWDTAIAPLDGEELIVEVLEDVPLTMHNFVRKTFFSLAFCDFCLKFLFHGFRCQTCGYKFHQHCSSKVPTVCVDMSTNRQQFYHSVQDLSGGSRQHEAPSNRPLNELLTPQGPSPRTQHCDPEHFPFPAPANAPLQRIRSTSTPNVHMVSTTAPMDSNLIQLTGQSFSTDAAGSRGGSDGTPRGSPSPASVSSGRKSPHSKSPAEQRERKSLADDKKKVKNLGYRDSGYYWEVPPSEVQLLKRIGTGSFGTVFRGRWHGDVAVMVLKVSQPTAEQAQAFKNEMQVLRKTRHVNILLFMGFMTRPGFAIITQWCEGSSLYHHLHVADTRFDMVQLIDVARQTAQGMDYLHAKNIIHRDLKSNNIFLHEGLTVKIGDFGLATVKTRWSGAQPLEQPSGSVLWMAAEVIRMQDPNPYSFQSDVYAYGVVLYELMTGSLPYSHIGCRDQIIFMVGRGYLSPDLSKISSNCPKAMRRLLSDCLKFQREERPLFPQILATIELLQRSLPKIERSASEPSLHRTQADELPACLLSAARLVP

SEQ ID NO: 9545 - DNA, 2298 bp, Homo sapiens
  CDS (1)..(2298)
atggcggcgctgagcggtggcggtggtggcggcgcggagccgggccaggctctgttcaacggggacatggagcccgaggccggcgccggcgccggcgccgcggcctcttcggctgcggaccctgccattccggaggaggtgtggaatatcaaacaaatgattaagttgacacaggaacatatagaggccctattggacaaatttggtggggagcataatccaccatcaatatatctggaggcctatgaagaatacaccagcaagctagatgcactccaacaaagagaacaacagttattggaatctctggggaacggaactgatttttctgtttctagctctgcatcaatggataccgttacatcttcttcctcttctagcctttcagtgctaccttcatctctttcagtttttcaaaatcccacagatgtggcacggagcaaccccaagtcaccacaaaaacctatcgttagagtcttcctgcccaacaaacagaggacagtggtacctgcaaggtgtggagttacagtccgagacagtctaaagaaagcactgatgatgagaggtctaatcccagagtgctgtgctgtttacagaattcaggatggagagaagaaaccaattggttgggacactgatatttcctggcttactggagaagaattgcatgtggaagtgttggagaatgttccacttacaacacacaactttgtacgaaaaacgtttttcaccttagcattttgtgacttttgtcgaaagctgcttttccagggtttccgctgtcaaacatgtggttataaatttcaccagcgttgtagtacagaagttccactgatgtgtgttaattatgaccaacttgatttgctgtttgtctccaagttctttgaacaccacccaataccacaggaagaggcgtccttagcagagactgccctaacatctggatcatccccttccgcacccgcctcggactctattgggccccaaattctcaccagtccgtctccttcaaaatccattccaattccacagcccttccgaccagcagatgaagatcatcgaaatcaatttgggcaacgagaccgatcctcatcagctcccaatgtgcatataaacacaatagaacctgtcaatattgatgacttgattagagaccaaggatttcgtggtgatggaggatcaaccacaggtttgtctgctaccccccctgcctcattacctggctcactaactaacgtgaaagccttacagaaatctccaggacctcagcgagaaaggaagtcatcttcatcctcagaagacaggaatcgaatgaaaacacttggtagacgggactcgagtgatgattgggagattcctgatgggcagattacagtgggacaaagaattggatctggatcatttggaacagtctacaagggaaagtggcatggtgatgtggcagtgaaaatgttgaatgtgacagcacctacacctcagcagttacaagccttcaaaaatgaagtaggagtactcaggaaaacacgacatgtgaatatcctactcttcatgggctattccacaaagccacaactggctattgttacccagtggtgtgagggctccagcttgtatcaccatctccatatcattgagaccaaatttgagatgatcaaacttatagatattgcacgacagactgcacagggcatggattacttacacgccaagtcaatcatccacagagacctcaagagtaataatatatttcttcatgaagacctcacagtaaaaataggtgattttggtctagctacagtgaaatctcgatggagtgggtcccatcagtttgaacagttgtctggatccattttgtggatggcaccagaagtcatcagaatgcaagataaaaatccatacagctttcagtcagatgtatatgcatttggaattgttctgtatgaattgatgactggacagttaccttattcaaacatcaacaacagggaccagataatttttatggtgggacgaggatacctgtctccagatctcagtaaggtacggagtaactgtccaaaagccatgaagagattaatggcagagtgcctcaaaaagaaaagagatgagagaccactctttccccaaattctcgcctctattgagctgctggcccgctcattgccaaaaattcaccgcagtgcatcagaaccctccttgaatcgggctggtttccaaacagaggattttagtctatatgcttgtgcttctccaaaaacacccatccaggcagggggatatggtgcgtttcctgtccac

SEQ ID NO: 9546 - protein, 766 aa, Homo sapiens [sequence omitted]

SEQ ID NO: 9547 - DNA, 1437 bp, Homo sapiens
  CDS (1)..(1437)
atggacttcagcagaaatctttatgatattggggaacaactggacagtgaagatctggcctccctcaagttcctgagcctggactacattccgcaaaggaagcaagaacccatcaaggatgccttgatgttattccagagactccaggaaaagagaatgttggaggaaagcaatctgtccttcctgaaggagctgctcttccgaattaatagactggatttgctgattacctacctaaacactagaaaggaggagatggaaagggaacttcagacaccaggcagggctcaaatttctgcctacagggtcatgctctatcagatttcagaagaagtgagcagatcagaattgaggtcttttaagtttcttttgcaagaggaaatctccaaatgcaaactggatgatgacatgaacctgctggatattttcatagagatggagaagagggtcatcctgggagaaggaaagttggacatcctgaaaagagtctgtgcccaaatcaacaagagcctgctgaagataatcaacgactatgaagaattcagcaaagagagaagcagcagccttgaaggaagtcctgatgaattttcaaatggggaggagttgtgtggggtaatgacaatctcggactctccaagagaacaggatagtgaatcacagactttggacaaagtttaccaaatgaaaagcaaacctcggggatactgtctgatcatcaacaatcacaattttgcaaaagcacgggagaaagtgcccaaacttcacagcattagggacaggaatggaacacacttggatgcaggggctttgaccacgacctttgaagagcttcattttgagatcaagccccacgatgactgcacagtagagcaaatctatgagattttgaaaatctaccaactcatggaccacagtaacatggactgcttcatctgctgtatcctctcccatggagacaagggcatcatctatggcactgatggacaggaggcccccatctatgagctgacatctcagttcactggtttgaagtgcccttcccttgctggaaaacccaaagtgttttttattcaggcttgtcagggggataactaccagaaaggtatacctgttgagactgattcagaggagcaaccctatttagaaatggatttatcatcacctcaaacgagatatatcccggatgaggctgactttctgctggggatggccactgtgaataactgtgtttcctaccgaaaccctgcagagggaacctggtacatccagtcactttgccagagcctgagagagcgatgtcctcgaggcgatgatattctcaccatcctgactgaagtgaactatgaagtaagcaacaaggatgacaagaaaaacatggggaaacagatgcctcagcctactttcacactaagaaaaaaacttgtcttcccttctgat

SEQ ID NO: 9548 - protein, 479 aa, Homo sapiens
MDFSRNLYDIGEQLDSEDLASLKFLSLDYIPQRKQEPIKDALMLFQRLQEKRMLEESNLSFLKELLFRINRLDLLITYLNTRKEEMERELQTPGRAQISAYRVMLYQISEEVSRSELRSFKFLLQEEISKCKLDDDMNLLDIFIEMEKRVILGEGKLDILKRVCAQINKSLLKIINDYEEFSKERSSSLEGSPDEFSNGEELCGVMTISDSPREQDSESQTLDKVYQMKSKPRGYCLIINNHNFAKAREKVPKLHSIRDRNGTHLDAGALTTTFEELHFEIKPHDDCTVEQIYEILKIYQLMDHSNMDCFICCILSHGDKGIIYGTDGQEAPIYELTSQFTGLKCPSLAGKPKVFFIQACQGDNYQKGIPVETDSEEQPYLEMDLSSPQTRYIPDEADFLLGMATVNNCVSYRNPAEGTWYIQSLCQSLRERCPRGDDILTILTEVNYEVSNKDDKKNMGKQMPQPTFTLRKKLVFPSD

SEQ ID NO: 9549 - DNA, 888 bp, Homo sapiens
  CDS (1)..(888)
atggaacaccagctcctgtgctgcgaagtggaaaccatccgccgcgcgtaccccgatgccaacctcctcaacgaccgggtgctgcgggccatgctgaaggcggaggagacctgcgcgccctcggtgtcctacttcaaatgtgtgcagaaggaggtcctgccgtccatgcggaagatcgtcgccacctggatgctggaggtctgcgaggaacagaagtgcgaggaggaggtcttcccgctggccatgaactacctggaccgcttcctgtcgctggagcccgtgaaaaagagccgcctgcagctgctgggggccacttgcatgttcgtggcctctaagatgaaggagaccatccccctgacggccgagaagctgtgcatctacaccgacaactccatccggcccgaggagctgctgcaaatggagctgctcctggtgaacaagctcaagtggaacctggccgcaatgaccccgcacgatttcattgaacacttcctctccaaaatgccagaggcggaggagaacaaacagatcatccgcaaacacgcgcagaccttcgttgccctctgtgccacagatgtgaagttcatttccaatccgccctccatggtggcagcggggagcgtggtggccgcagtgcaaggcctgaacctgaggagccccaacaacttcctgtcctactaccgcctcacacgcttcctctccagagtgatcaagtgtgacccggactgcctccgggcctgccaggagcagatcgaagccctgctggagtcaagcctgcgccaggcccagcagaacatggaccccaaggccgccgaggaggaggaagaggaggaggaggaggtggacctggcttgcacacccaccgacgtgcgggacgtggacatctga

SEQ ID NO: 9550 - protein, 295 aa, Homo sapiens
MEHQLLCCEVETIRRAYPDANLLNDRVLRAMLKAEETCAPSVSYFKCVQKEVLPSMRKIVATWMLEVCEEQKCEEEVFPLAMNYLDRFLSLEPVKKSRLQLLGATCMFVASKMKETIPLTAEKLCIYTDNSIRPEELLQMELLLVNKLKWNLAAMTPHDFIEHFLSKMPEAEENKQIIRKHAQTFVALCATDVKFISNPPSMVAAGSVVAAVQGLNLRSPNNFLSYYRLTRFLSRVIKCDPDCLRACQEQIEALLESSLRQAQQNMDPKAAEEEEEEEEEVDLACTPTDVRDVDI

SEQ ID NO: 9551 - DNA, 2646 bp, Homo sapiens
  CDS (1)..(2646)
atgggcccttggagccgcagcctctcggcgctgctgctgctgctgcaggtctcctcttggctctgccaggagccggagccctgccaccctggctttgacgccgagagctacacgttcacggtgccccggcgccacctggagagaggccgcgtcctgggcagagtgaattttgaagattgcaccggtcgacaaaggacagcctatttttccctcgacacccgattcaaagtgggcacagatggtgtgattacagtcaaaaggcctctacggtttcataacccacagatccatttcttggtctacgcctgggactccacctacagaaagttttccaccaaagtcacgctgaatacagtggggcaccaccaccgccccccgccccatcaggcctccgtttctggaatccaagcagaattgctcacatttcccaactcctctcctggcctcagaagacagaagagagactgggttattcctcccatcagctgcccagaaaatgaaaaaggcccatttcctaaaaacctggttcagatcaaatccaacaaagacaaagaaggcaaggttttctacagcatcactggccaaggagctgacacaccccctgttggtgtctttattattgaaagagaaacaggatggctgaaggtgacagagcctctggatagagaacgcattgccacatacactctcttctctcacgctgtgtcatccaacgggaatgcagttgaggatccaatggagattttgatcacggtaaccgatcagaatgacaacaagcccgaattcacccaggaggtctttaaggggtctgtcatggaaggtgctcttccaggaacctctgtgatggaggtcacagccacagacgcggacgatgatgtgaacacctacaatgccgccatcgcttacaccatcctcagccaagatcctgagctccctgacaaaaatatgttcaccattaacaggaacacaggagtcatcagtgtggtcaccactgggctggaccgagagagtttccctacgtataccctggtggttcaagctgctgaccttcaaggtgaggggttaagcacaacagcaacagctgtgatcacagtcactgacaccaacgataatcctccgatcttcaatcccaccacgtacaagggtcaggtgcctgagaacgaggctaacgtcgtaatcaccacactgaaagtgactgatgctgatgcccccaataccccagcgtgggaggctgtatacaccatattgaatgatgatggtggacaatttgtcgtcaccacaaatccagtgaacaacgatggcattttgaaaacagcaaagggcttggattttgaggccaagcagcagtacattctacacgtagcagtgacgaatgtggtaccttttgaggtctctctcaccacctccacagccaccgtcaccgtggatgtgctggatgtgaatgaagcccccatctttgtgcctcctgaaaagagagtggaagtgtccgaggactttggcgtgggccaggaaatcacatcctacactgcccaggagccagacacatttatggaacagaaaataacatatcggatttggagagacactgccaactggctggagattaatccggacactggtgccatttccactcgggctgagctggacagggaggattttgagcacgtgaagaacagcacgtacacagccctaatcatagctacagacaatggttctccagttgctactggaacagggacacttctgctgatcctgtctgatgtgaatgacaacgcccccataccagaacctcgaactatattcttctgtgagaggaatccaaagcctcaggtcataaacatcattgatgcagaccttcctcccaatacatctcccttcacagcagaactaacacacggggcgagtgccaactggaccattcagtacaacgacccaacccaagaatctatcattttgaagccaaagatggccttagaggtgggtgactacaaaatcaatctcaagctcatggataaccagaataaagaccaagtgaccaccttagaggtcagcgtgtgtgactgtgaaggggccgctggcgtctgtaggaaggcacagcctgtcgaagcaggattgcaaattcctgccattctggggattcttggaggaattcttgctttgctaattctgattctgctgctcttgctgtttcttcggaggagagcggtggtcaaagagcccttactgcccccagaggatgacacccgggacaacgtttattactatgatgaagaaggaggcggagaagaggaccaggactttgacttgagccagctgcacaggggcctggacgctcggcctgaagtgactcgtaacgacgttgcaccaaccctcatgagtgtcccccggtatcttccccgccctgccaatcccgatgaaattggaaattttattgatgaaaatctgaaagcggctgatactgaccccacagccccgccttatgattctctgctcgtgtttgactatgaaggaagcggttccgaagctgctagtctgagctccctgaactcctcagagtcagacaaagaccaggactatgactacttgaacgaatggggcaatcgcttcaagaagctggctgacatgtacggaggcggcgaggacgac

SEQ ID NO: 9552 - protein, 882 aa, Homo sapiens
MGPWSRSLSALLLLLQVSSWLCQEPEPCHPGFDAESYTFTVPRRHLERGRVLGRVNFEDCTGRQRTAYFSLDTRFKVGTDGVITVKRPLRFHNPQIHFLVYAWDSTYRKFSTKVTLNTVGHHHRPPPHQASVSGIQAELLTFPNSSPGLRRQKRDWVIPPISCPENEKGPFPKNLVQIKSNKDKEGKVFYSITGQGADTPPVGVFIIERETGWLKVTEPLDRERIATYTLFSHAVSSNGNAVEDPMEILITVTDQNDNKPEFTQEVFKGSVMEGALPGTSVMEVTATDADDDVNTYNAAIAYTILSQDPELPDKNMFTINRNTGVISVVTTGLDRESFPTYTLVVQAADLQGEGLSTTATAVITVTDTNDNPPIFNPTTYKGQVPENEANVVITTLKVTDADAPNTPAWEAVYTILNDDGGQFVVTTNPVNNDGILKTAKGLDFEAKQQYILHVAVTNVVPFEVSLTTSTATVTVDVLDVNEAPIFVPPEKRVEVSEDFGVGQEITSYTAQEPDTFMEQKITYRIWRDTANWLEINPDTGAISTRAELDREDFEHVKNSTYTALIIATDNGSPVATGTGTLLLILSDVNDNAPIPEPRTIFFCERNPKPQVINIIDADLPPNTSPFTAELTHGASANWTIQYNDPTQESIILKPKMALEVGDYKINLKLMDNQNKDQVTTLEVSVCDCEGAAGVCRKAQPVEAGLQIPAILGILGGILALLILILLLLLFLRRRAVVKEPLLPPEDDTRDNVYYYDEEGGGEEDQDFDLSQLHRGLDARPEVTRNDVAPTLMSVPRYLPRPANPDEIGNFIDENLKAADTDPTAPPYDSLLVFDYEGSGSEAASLSSLNSSESDKDQDYDYLNEWGNRFKKLADMYGGGEDD

SEQ ID NO: 9553 - DNA, 468 bp, Homo sapiens
  CDS (1)..(468)
atggagccggcggcggggagcagcatggagccttcggctgactggctggccacggccgcggcccggggtcgggtagaggaggtgcgggcgctgctggaggcgggggcgctgcccaacgcaccgaatagttacggtcggaggccgatccaggtcatgatgatgggcagcgcccgagtggcggagctgctgctgctccacggcgcggagcccaactgcgccgaccccgccactctcacccgacccgtgcacgacgctgcccgggagggcttcctggacacgctggtggtgctgcaccgggccggggcgcggctggacgtgcgcgatgcctggggccgtctgcccgtggacctggctgaggagctgggccatcgcgatgtcgcacggtacctgcgcgcggctgcggggggcaccagaggcagtaaccatgcccgcatagatgccgcggaaggtccctcagacatccccgat

SEQ ID NO: 9554 - protein, 156 aa, Homo sapiens
MEPAAGSSMEPSADWLATAAARGRVEEVRALLEAGALPNAPNSYGRRPIQVMMMGSARVAELLLLHGAEPNCADPATLTRPVHDAAREGFLDTLVVLHRAGARLDVRDAWGRLPVDLAEELGHRDVARYLRAAAGGTRGSNHARIDAAEGPSDIPD

SEQ ID NO: 9555 - DNA, 1629 bp, Homo sapiens
  CDS (1)..(1629)
atgtctcgggagtcggatgttgaggctcagcagtctcatggcagcagtgcctgttcacagccccatggcagcgttacccagtcccaaggctcctcctcacagtcccagggcatatccagctcctctaccagcacgatgccaaactccagccagtcctctcactccagctctgggacactgagctccttagagacagtgtccactcaggaactctattctattcctgaggaccaagaacctgaggaccaagaacctgaggagcctacccctgccccctgggctcgattatgggcccttcaggatggatttgccaatcttgaatgtgtgaatgacaactactggtttgggagggacaaaagctgtgaatattgctttgatgaaccactgctgaaaagaacagataaataccgaacatacagcaagaaacactttcggattttcagggaagtgggtcctaaaaactcttacattgcatacatagaagatcacagtggcaatggaacctttgtaaatacagagcttgtagggaaaggaaaacgccgtcctttgaataacaattctgaaattgcactgtcactaagcagaaataaagtttttgtcttttttgatctgactgtagatgatcagtcagtttatcctaaggcattaagagatgaatacatcatgtcaaaaactcttggaagtggtgcctgtggagaggtaaagctggctttcgagaggaaaacatgtaagaaagtagccataaagatcatcagcaaaaggaagtttgctattggttcagcaagagaggcagacccagctctcaatgttgaaacagaaatagaaattttgaaaaagctaaatcatccttgcatcatcaagattaaaaacttttttgatgcagaagattattatattgttttggaattgatggaagggggagagctgtttgacaaagtggtggggaataaacgcctgaaagaagctacctgcaagctctatttttaccagatgctcttggctgtgcagtaccttcatgaaaacggtattatacaccgtgacttaaagccagagaatgttttactgtcatctcaagaagaggactgtcttataaagattactgattttgggcactccaagattttgggagagacctctctcatgagaaccttatgtggaacccccacctacttggcgcctgaagttcttgtttctgttgggactgctgggtataaccgtgctgtggactgctggagtttaggagttattctttttatctgccttagtgggtatccacctttctctgagcataggactcaagtgtcactgaaggatcagatcaccagtggaaaatacaacttcattcctgaagtctgggcagaagtctcagagaaagctctggaccttgtcaagaagttgttggtagtggatccaaaggcacgttttacgacagaagaagccttaagacacccgtggcttcaggatgaagacatgaagagaaagtttcaagatcttctgtctgaggaaaatgaatccacagctctaccccaggttctagcccagccttctactagtcgaaagcggccccgtgaaggggaagccgagggtgccgagaccacaaagcgcccagctgtgtgtgctgctgtgttg

SEQ ID NO: 9556 - protein, 543 aa, Homo sapiens
MSRESDVEAQQSHGSSACSQPHGSVTQSQGSSSQSQGISSSSTSTMPNSSQSSHSSSGTLSSLETVSTQELYSIPEDQEPEDQEPEEPTPAPWARLWALQDGFANLECVNDNYWFGRDKSCEYCFDEPLLKRTDKYRTYSKKHFRIFREVGPKNSYIAYIEDHSGNGTFVNTELVGKGKRRPLNNNSEIALSLSRNKVFVFFDLTVDDQSVYPKALRDEYIMSKTLGSGACGEVKLAFERKTCKKVAIKIISKRKFAIGSAREADPALNVETEIEILKKLNHPCIIKIKNFFDAEDYYIVLELMEGGELFDKVVGNKRLKEATCKLYFYQMLLAVQYLHENGIIHRDLKPENVLLSSQEEDCLIKITDFGHSKILGETSLMRTLCGTPTYLAPEVLVSVGTAGYNRAVDCWSLGVILFICLSGYPPFSEHRTQVSLKDQITSGKYNFIPEVWAEVSEKALDLVKKLLVVDPKARFTTEEALRHPWLQDEDMKRKFQDLLSEENESTALPQVLAQPSTSRKRPREGEAEGAETTKRPAVCAAVL

SEQ ID NO: 9557 - DNA, 2343 bp, Homo sapiens
  CDS (1)..(2343)
atggctactcaagctgatttgatggagttggacatggccatggaaccagacagaaaagcggctgttagtcactggcagcaacagtcttacctggactctggaatccattctggtgccactaccacagctccttctctgagtggtaaaggcaatcctgaggaagaggatgtggatacctcccaagtcctgtatgagtgggaacagggattttctcagtccttcactcaagaacaagtagctgatattgatggacagtatgcaatgactcgagctcagagggtacgagctgctatgttccctgagacattagatgagggcatgcagatcccatctacacagtttgatgctgctcatcccactaatgtccagcgtttggctgaaccatcacagatgctgaaacatgcagttgtaaacttgattaactatcaagatgatgcagaacttgccacacgtgcaatccctgaactgacaaaactgctaaatgacgaggaccaggtggtggttaataaggctgcagttatggtccatcagctttctaaaaaggaagcttccagacacgctatcatgcgttctcctcagatggtgtctgctattgtacgtaccatgcagaatacaaatgatgtagaaacagctcgttgtaccgctgggaccttgcataacctttcccatcatcgtgagggcttactggccatctttaagtctggaggcattcctgccctggtgaaaatgcttggttcaccagtggattctgtgttgttttatgccattacaactctccacaaccttttattacatcaagaaggagctaaaatggcagtgcgtttagctggtgggctgcagaaaatggttgccttgctcaacaaaacaaatgttaaattcttggctattacgacagactgccttcaaattttagcttatggcaaccaagaaagcaagctcatcatactggctagtggtggaccccaagctttagtaaatataatgaggacctatacttacgaaaaactactgtggaccacaagcagagtgctgaaggtgctatctgtctgctctagtaataagccggctattgtagaagctggtggaatgcaagctttaggacttcacctgacagatccaagtcaacgtcttgttcagaactgtctttggactctcaggaatctttcagatgctgcaactaaacaggaagggatggaaggtctccttgggactcttgttcagcttctgggttcagatgatataaatgtggtcacctgtgcagctggaattctttctaacctcacttgcaataattataagaacaagatgatggtctgccaagtgggtggtatagaggctcttgtgcgtactgtccttcgggctggtgacagggaagacatcactgagcctgccatctgtgctcttcgtcatctgaccagccgacaccaagaagcagagatggcccagaatgcagttcgccttcactatggactaccagttgtggttaagctcttacacccaccatcccactggcctctgataaaggctactgttggattgattcgaaatcttgccctttgtcccgcaaatcatgcacctttgcgtgagcagggtgccattccacgactagttcagttgcttgttcgtgcacatcaggatacccagcgccgtacgtccatgggtgggacacagcagcaatttgtggagggggtccgcatggaagaaatagttgaaggttgtaccggagcccttcacatcctagctcgggatgttcacaaccgaattgttatcagaggactaaataccattccattgtttgtgcagctgctttattctcccattgaaaacatccaaagagtagctgcaggggtcctctgtgaacttgctcaggacaaggaagctgcagaagctattgaagctgagggagccacagctcctctgacagagttacttcactctaggaatgaaggtgtggcgacatatgcagctgctgttttgttccgaatgtctgaggacaagccacaagattacaagaaacggctttcagttgagctgaccagctctctcttcagaacagagccaatggcttggaatgagactgctgatcttggacttgatattggtgcccagggagaaccccttggatatcgccaggatgatcctagctatcgttcttttcactctggtggatatggccaggatgccttgggtatggaccccatgatggaacatgagatgggtggccaccaccctggtgctgactatccagttgatgggctgccagatctggggcatgcccaggacctcatggatgggctgcctccaggtgacagcaatcagctggcctggtttgatactgacctg

SEQ ID NO: 9558 - protein, 781 aa, Homo sapiens
MATQADLMELDMAMEPDRKAAVSHWQQQSYLDSGIHSGATTTAPSLSGKGNPEEEDVDTSQVLYEWEQGFSQSFTQEQVADIDGQYAMTRAQRVRAAMFPETLDEGMQIPSTQFDAAHPTNVQRLAEPSQMLKHAVVNLINYQDDAELATRAIPELTKLLNDEDQVVVNKAAVMVHQLSKKEASRHAIMRSPQMVSAIVRTMQNTNDVETARCTAGTLHNLSHHREGLLAIFKSGGIPALVKMLGSPVDSVLFYAITTLHNLLLHQEGAKMAVRLAGGLQKMVALLNKTNVKFLAITTDCLQILAYGNQESKLIILASGGPQALVNIMRTYTYEKLLWTTSRVLKVLSVCSSNKPAIVEAGGMQALGLHLTDPSQRLVQNCLWTLRNLSDAATKQEGMEGLLGTLVQLLGSDDINVVTCAAGILSNLTCNNYKNKMMVCQVGGIEALVRTVLRAGDREDITEPAICALRHLTSRHQEAEMAQNAVRLHYGLPVVVKLLHPPSHWPLIKATVGLIRNLALCPANHAPLREQGAIPRLVQLLVRAHQDTQRRTSMGGTQQQFVEGVRMEEIVEGCTGALHILARDVHNRIVIRGLNTIPLFVQLLYSPIENIQRVAAGVLCELAQDKEAAEAIEAEGATAPLTELLHSRNEGVATYAAAVLFRMSEDKPQDYKKRLSVELTSSLFRTEPMAWNETADLGLDIGAQGEPLGYRQDDPSYRSFHSGGYGQDALGMDPMMEHEMGGHHPGADYPVDGLPDLGHAQDLMDGLPPGDSNQLAWFDTDL

SEQ ID NO: 9559 - DNA, 1986 bp, Homo sapiens
  CDS (1)..(1986)
atgagtcatgtggcagtggaaaatgcgctcgggctggaccagcagtttgctggcctagacctgaactcttcagataatcagagtggaggaagtacagccagcaaagggcgctatattcctcctcatttaaggaaccgagaagctactaaaggtttctacgataaagacagttcagggtggagttctagcaaagataaggatgcgtatagcagttttggatctcgtagtgattcaagagggaagtctagcttcttcagtgatcgtggaagtggatcaaggggaaggtttgatgatcgtggacggagtgattacgatggcattggcagccgtggtgacagaagtggctttggcaaatttgaacgtggtggaaacagtcgctggtgtgacaaatcagatgaagatgattggtcaaaaccactcccaccaagtgaacgcttggaacaggaactcttttctggaggcaacactgggattaattttgagaaatacgatgacattccagttgaggcaacaggcaacaactgtcctccacatattgaaagtttcagtgatgttgagatgggagaaattatcatgggaaacattgagcttactcgttatactcgcccaactccagtgcaaaagcatgctattcctattatcaaagagaaaagagacttgatggcttgtgcccaaacagggtctggaaaaactgcagcatttctgttgcccatcttgagtcagatttattcagatggtccaggcgaggctttgagggccatgaaggaaaatggaaggtatgggcgccgcaaacaatacccaatctccttggtattagcaccaacgagagagttggcagtacagatctacgaggaagccagaaaattttcataccgatctagagttcgtccttgcgtggtttatggtggtgccgatattggtcagcagattcgagacttggaacgtggatgccatttgttagtagccactccaggacgtctagtggatatgatggaaagaggaaagattggattagacttttgcaaatacttggtgttagatgaagctgatcggatgttggatatggggtttgagcctcagattcgtagaatagtcgaacaagatactatgcctccaaagggtgtccgccacactatgatgtttagtgctacttttcctaaggaaatacagatgctggctcgtgatttcttagatgaatatatcttcttggctgtaggaagagttggctctacctctgaaaacatcacacagaaagtagtttgggtggaagaatcagacaaacggtcatttctgcttgacctcctaaatgcaacaggcaaggattcactgaccttagtgtttgtggagaccaaaaagggtgcagattctctggaggatttcttataccatgaaggatacgcatgtaccagcatccatggagaccgttctcagagggatagagaagaggcccttcaccagttccgctcaggaaaaagcccaattttagtggctacagcagtagcagcaagaggactggacatttcaaatgtgaaacatgttatcaattttgacttgccaagtgatattgaagaatatgtacatcgtattggtcgtacgggacgtgtaggaaaccttggcctggcaacctcattctttaacgagaggaacataaatattactaaggatttgttggatcttcttgttgaagctaaacaagaagtgccgtcttggttagaaaacatggcttatgaacaccactacaagggtagcagtcgtggacgttctaagagtagcagatttagtggagggtttggtgccagagactaccgacaaagtagcggtgccagcagttccagcttcagcagcagccgcgcaagcagcagccgcagtggcggaggtggccacggtagcagcagaggatttggtggaggtggctatggaggcttttacaacagtgatggatatggaggaaattataactcccagggggttgactggtggggtaac

SEQ ID NO: 9560 - protein, 662 aa, Homo sapiens
MSHVAVENALGLDQQFAGLDLNSSDNQSGGSTASKGRYIPPHLRNREATKGFYDKDSSGWSSSKDKDAYSSFGSRSDSRGKSSFFSDRGSGSRGRFDDRGRSDYDGIGSRGDRSGFGKFERGGNSRWCDKSDEDDWSKPLPPSERLEQELFSGGNTGINFEKYDDIPVEATGNNCPPHIESFSDVEMGEIIMGNIELTRYTRPTPVQKHAIPIIKEKRDLMACAQTGSGKTAAFLLPILSQIYSDGPGEALRAMKENGRYGRRKQYPISLVLAPTRELAVQIYEEARKFSYRSRVRPCVVYGGADIGQQIRDLERGCHLLVATPGRLVDMMERGKIGLDFCKYLVLDEADRMLDMGFEPQIRRIVEQDTMPPKGVRHTMMFSATFPKEIQMLARDFLDEYIFLAVGRVGSTSENITQKVVWVEESDKRSFLLDLLNATGKDSLTLVFVETKKGADSLEDFLYHEGYACTSIHGDRSQRDREEALHQFRSGKSPILVATAVAARGLDISNVKHVINFDLPSDIEEYVHRIGRTGRVGNLGLATSFFNERNINITKDLLDLLVEAKQEVPSWLENMAYEHHYKGSSRGRSKSSRFSGGFGARDYRQSSGASSSSFSSSRASSSRSGGGGHGSSRGFGGGGYGGFYNSDGYGGNYNSQGVDWWGN

SEQ ID NO: 9561 - DNA, 5766 bp, Homo sapiens
  CDS (1)..(5556)
atgaaaagccctgctttgcaacccctcagcatggcaggcctgcagctcatgacccctgcttcctcaccaatgggtcctttctttggactgccatggcaacaagaagcaattcatgataacatttatacgccaagaaaatatcaggttgaactgcttgaagcagctctggatcataataccatcgtctgtttaaacactggctcagggaagacatttattgcagtactactcactaaagagctgtcctatcagatcaggggagacttcagcagaaatggaaaaaggacggtgttcttggtcaactctgcaaaccaggttgctcaacaagtgtcagctgtcagaactcattcagatctcaaggttggggaatactcaaacctagaagtaaatgcatcttggacaaaagagagatggaaccaagagtttactaagcaccaggttctcattatgacttgctatgtcgccttgaatgttttgaaaaatggttacttatcactgtcagacattaaccttttggtgtttgatgagtgtcatcttgcaatcctagaccacccctatcgagaaattatgaagctctgtgaaaattgtccatcatgtcctcgcattttgggactaactgcttccattttaaatgggaaatgtgatccagaggaattggaagaaaagattcagaaactagagaaaattcttaagagtaatgctgaaactgcaactgacctggtggtcttagacaggtatacttctcagccatgtgagattgtggtggattgtggaccatttactgacagaagtgggctttatgaaagactgctgatggaattagaagaagcacttaattttatcaatgattgtaatatatctgtacattcaaaagaaagagattctactttaatttcgaaacagatactatcagactgtcgtgccgtattggtagttctgggaccctggtgtgcagataaagtagctggaatgatggtaagagaactacagaaatacatcaaacatgagcaagaggagctgcacaggaaatttttattgtttacagacactttcctaaggaaaatacatgcactatgtgaagagcacttctcacctgcctcacttgacctgaaatttgtaactcctaaagtaatcaaactgctcgaaatcttacgcaaatataaaccatatgagcgacagcagtttgaaagcgttgagtggtataataatagaaatcaggataattatgtgtcatggagtgattctgaggatgatgatgaggatgaagaaattgaagaaaaagagaagccagagacaaattttccttctccttttaccaacattttgtgcggaattatttttgtggaaagaagatacacagcagttgtcttaaacagattgataaaggaagctggcaaacaagatccagagctggcttatatcagtagcaatttcataactggacatggcattgggaagaatcagcctcgcaacaaacagatggaagcagaattcagaaaacaggaagaggtacttaggaaatttcgagcacatgagaccaacctgcttattgcaacaagtattgtagaagagggtgttgatataccaaaatgcaacttggtggttcgttttgatttgcccacagaatatcgatcctatgttcaatctaaaggaagagcaagggcacccatctctaattatataatgttagcggatacagacaaaataaaaagttttgaagaagaccttaaaacctacaaagctattgaaaagatcttgagaaacaagtgttccaagtcggttgatactggtgagactgacattgatcctgtcatggatgatgatgacgttttcccaccatatgtgttgaggcctgacgatggtggtccacgagtcacaatcaacacggccattggacacatcaatagatactgtgctagattaccaagtgatccgtttactcatctagctcctaaatgcagaacccgagagttgcctgatggtacattttattcaactctttatctgccaattaactcacctcttcgagcctccattgttggtccaccaatgagctgtgtacgattggctgaaagagttgtagctctcatttgctgtgagaaactgcacaaaattggcgaactggatgaccatttgatgccagttgggaaagagactgttaaatatgaagaggagcttgatttgcatgatgaagaagagaccagtgttccaggaagaccaggttccacgaaacgaaggcagtgctacccaaaagcaattccagagtgtttgagggatagttatcccagacctgatcagccctgttacctgtatgtgataggaatggttttaactacacctttacctgatgaactcaactttagaaggcggaagctctatcctcctgaagataccacaagatgctttggaatactgacggccaaacccatacctcagattccacactttcctgtgtacacacgctctggagaggttaccatatccattgagttgaagaagtctggtttcatgttgtctctacaaatgcttgagttgattacaagacttcaccagtatatattctcacatattcttcggcttgaaaaacctgcactagaatttaaacctacagacgctgattcagcatactgtgttctacctcttaatgttgttaatgactccagcactttggatattgactttaaattcatggaagatattgagaagtctgaagctcgcataggcattcccagtacaaagtatacaaaagaaacaccctttgtttttaaattagaagattaccaagatgccgttatcattccaagatatcgcaattttgatcagcctcatcgattttatgtagctgatgtgtacactgatcttaccccactcagtaaatttccttcccctgagtatgaaacttttgcagaatattataaaacaaagtacaaccttgacctaaccaatctcaaccagccactgctggatgtggaccacacatcttcaagacttaatcttttgacacctcgacatttgaatcagaaggggaaagcgcttcctttaagcagtgctgagaagaggaaagccaaatgggaaagtctgcagaataaacagatactggttccagaactctgtgctatacatccaattccagcatcactgtggagaaaagctgtttgtctccccagcatactttatcgccttcactgccttttgactgcagaggagctaagagcccagactgccagcgatgctggcgtgggagtcagatcacttcctgcggattttagataccctaacttagacttcgggtggaaaaaatctattgacagcaaatctttcatctcaatttctaactcctcttcagctgaaaatgataattactgtaagcacagcacaattgtccctgaaaatgctgcacatcaaggtgctaatagaacctcctctctagaaaatcatgaccaaatgtctgtgaactgcagaacgttgctcagcgagtcccctggtaagctccacgttgaagtttcagcagatcttacagcaattaatggtctttcttacaatcaaaatctcgccaatggcagttatgatttagctaacagagacttttgccaaggaaatcagctaaattactacaagcaggaaatacccgtgcaaccaactacctcatattccattcagaatttatacagttacgagaaccagccccagcccagcgatgaatgtactctcctgagtaataaataccttgatggaaatgctaacaaatctacctcagatggaagtcctgtgatggccgtaatgcctggtacgacagacactattcaagtgctcaagggcaggatggattctgagcagagcccttctattgggtactcctcaaggactcttggccccaatcctggacttattcttcaggctttgactctgtcaaacgctagtgatggatttaacctggagcggcttgaaatgcttggcgactcctttttaaagcatgccatcaccacatatctattttgcacttaccctgatgcgcatgagggccgcctttcatatatgagaagcaaaaaggtcagcaactgtaatctgtatcgccttggaaaaaagaagggactacccagccgcatggtggtgtcaatatttgatccccctgtgaattggcttcctcctggttatgtagtaaatcaagacaaaagcaacacagataaatgggaaaaagatgaaatgacaaaagactgcatgctggcgaatggcaaactggatgaggattacgaggaggaggatgaggaggaggagagcctgatgtggagggctccgaaggaagaggctgactatgaagatgatttcctggagtatgatcaggaacatatcagatttatagataatatgttaatggggtcaggagcttttgtaaagaaaatctctctttctcctttttcaaccactgattctgcatatgaatggaaaatgcccaaaaaatcctccttaggtagtatgccattttcatcagattttgaggattttgactacagctcttgggatgcaatgtgctatctggatcctagcaaagctgttgaagaagatgactttgtggtggggttctggaatccatcagaagaaaactgtggtgttgacacgggaaagcagtccatttcttacgacttgcacactgagcagtgtattgctgacaaaagcatagcggactgtgtggaagccctgctgggctgctatttaaccagctgtggggagagggctgctcagcttttcctctgttcactggggctgaaggtgctcccggtaattaaaaggactgatcgggaaaaggccctgtgccctactcgggagaatttcaacagccaacaaaagaacctttcagtgagctgtgctgctgcttctgtggccagttcacgctcttctgtattgaaagactcggaatatggttgtttgaagattccaccaagatgtatgtttgatcatccagatgcagataaaacactgaatcaccttatatcggggtttgaaaattttgaaaagaaaatcaactacagattcaagaataaggcttaccttctccaggcttttacacatgcctcctaccactacaatactatcactgattgttaccagcgcttagaattcctgggagatgcgattttggactacctcataaccaagcacctttatgaagacccgcggcagcactccccgggggtcctgacagacctgcggtctgccctggtcaacaacaccatctttgcatcgctggctgtaaagtacgactaccacaagtacttcaaagctgtctctcctgagctcttccatgtcattgatgactttgtgcagtttcagcttgagaagaatgaaatgcaaggaatggattctgagcttaggagatctgaggaggatgaagagaaagaagaggatattgaagttccaaaggccatgggggatatttttgagtcgcttgctggtgccatttacatggatagtgggatgtcactggagacagtctggcaggtgtactatcccatgatgcggccactaatagaaaagttttctgcaaatgtaccccgttcccctgtgcgagaattgcttgaaatggaaccagaaactgccaaatttagcccggctgagagaacttacgacgggaaggtcagagtcactgtggaagtagtaggaaaggggaaatttaaaggtgttggtcgaagttacaggattgccaaatctgcagcagcaagaagagccctccgaagcctcaaagctaatcaacctcaggttcccaatagc

SEQ ID NO: 9562 - protein, 1852 aa, Homo sapiens
MKSPALQPLSMAGLQLMTPASSPMGPFFGLPWQQEAIHDNIYTPRKYQVELLEAALDHNTIVCLNTGSGKTFIAVLLTKELSYQIRGDFSRNGKRTVFLVNSANQVAQQVSAVRTHSDLKVGEYSNLEVNASWTKERWNQEFTKHQVLIMTCYVALNVLKNGYLSLSDINLLVFDECHLAILDHPYREIMKLCENCPSCPRILGLTASILNGKCDPEELEEKIQKLEKILKSNAETATDLVVLDRYTSQPCEIVVDCGPFTDRSGLYERLLMELEEALNFINDCNISVHSKERDSTLISKQILSDCRAVLVVLGPWCADKVAGMMVRELQKYIKHEQEELHRKFLLFTDTFLRKIHALCEEHFSPASLDLKFVTPKVIKLLEILRKYKPYERQQFESVEWYNNRNQDNYVSWSDSEDDDEDEEIEEKEKPETNFPSPFTNILCGIIFVERRYTAVVLNRLIKEAGKQDPELAYISSNFITGHGIGKNQPRNKQMEAEFRKQEEVLRKFRAHETNLLIATSIVEEGVDIPKCNLVVRFDLPTEYRSYVQSKGRARAPISNYIMLADTDKIKSFEEDLKTYKAIEKILRNKCSKSVDTGETDIDPVMDDDDVFPPYVLRPDDGGPRVTINTAIGHINRYCARLPSDPFTHLAPKCRTRELPDGTFYSTLYLPINSPLRASIVGPPMSCVRLAERVVALICCEKLHKIGELDDHLMPVGKETVKYEEELDLHDEEETSVPGRPGSTKRRQCYPKAIPECLRDSYPRPDQPCYLYVIGMVLTTPLPDELNFRRRKLYPPEDTTRCFGILTAKPIPQIPHFPVYTRSGEVTISIELKKSGFMLSLQMLELITRLHQYIFSHILRLEKPALEFKPTDADSAYCVLPLNVVNDSSTLDIDFKFMEDIEKSEARIGIPSTKYTKETPFVFKLEDYQDAVIIPRYRNFDQPHRFYVADVYTDLTPLSKFPSPEYETFAEYYKTKYNLDLTNLNQPLLDVDHTSSRLNLLTPRHLNQKGKALPLSSAEKRKAKWESLQNKQILVPELCAIHPIPASLWRKAVCLPSILYRLHCLLTAEELRAQTASDAGVGVRSLPADFRYPNLDFGWKKSIDSKSFISISNSSSAENDNYCKHSTIVPENAAHQGANRTSSLENHDQMSVNCRTLLSESPGKLHVEVSADLTAINGLSYNQNLANGSYDLANRDFCQGNQLNYYKQEIPVQPTTSYSIQNLYSYENQPQPSDECTLLSNKYLDGNANKSTSDGSPVMAVMPGTTDTIQVLKGRMDSEQSPSIGYSSRTLGPNPGLILQALTLSNASDGFNLERLEMLGDSFLKHAITTYLFCTYPDAHEGRLSYMRSKKVSNCNLYRLGKKKGLPSRMVVSIFDPPVNWLPPGYVVNQDKSNTDKWEKDEMTKDCMLANGKLDEDYEEEDEEEESLMWRAPKEEADYEDDFLEYDQEHIRFIDNMLMGSGAFVKKISLSPFSTTDSAYEWKMPKKSSLGSMPFSSDFEDFDYSSWDAMCYLDPSKAVEEDDFVVGFWNPSEENCGVDTGKQSISYDLHTEQCIADKSIADCVEALLGCYLTSCGERAAQLFLCSLGLKVLPVIKRTDREKALCPTRENFNSQQKNLSVSCAAASVASSRSSVLKDSEYGCLKIPPRCMFDHPDADKTLNHLISGFENFEKKINYRFKNKAYLLQAFTHASYHYNTITDCYQRLEFLGDAILDYLITKHLYEDPRQHSPGVLTDLRSALVNNTIFASLAVKYDYHKYFKAVSPELFHVIDDFVQFQLEKNEMQGMDSELRRSEEDEEKEEDIEVPKAMGDIFESLAGAIYMDSGMSLETVWQVYYPMMRPLIEKFSANVPRS

SEQ ID NO: 9563 - DNA, 3633 bp, Homo sapiens
  CDS (1)..(3633)
atgcgaccctccgggacggccggggcagcgctcctggcgctgctggctgcgctctgcccggcgagtcgggctctggaggaaaagaaagtttgccaaggcacgagtaacaagctcacgcagttgggcacttttgaagatcattttctcagcctccagaggatgttcaataactgtgaggtggtccttgggaatttggaaattacctatgtgcagaggaattatgatctttccttcttaaagaccatccaggaggtggctggttatgtcctcattgccctcaacacagtggagcgaattcctttggaaaacctgcagatcatcagaggaaatatgtactacgaaaattcctatgccttagcagtcttatctaactatgatgcaaataaaaccggactgaaggagctgcccatgagaaatttacaggaaatcctgcatggcgccgtgcggttcagcaacaaccctgccctgtgcaacgtggagagcatccagtggcgggacatagtcagcagtgactttctcagcaacatgtcgatggacttccagaaccacctgggcagctgccaaaagtgtgatccaagctgtcccaatgggagctgctggggtgcaggagaggagaactgccagaaactgaccaaaatcatctgtgcccagcagtgctccgggcgctgccgtggcaagtcccccagtgactgctgccacaaccagtgtgctgcaggctgcacaggcccccgggagagcgactgcctggtctgccgcaaattccgagacgaagccacgtgcaaggacacctgccccccactcatgctctacaaccccaccacgtaccagatggatgtgaaccccgagggcaaatacagctttggtgccacctgcgtgaagaagtgtccccgtaattatgtggtgacagatcacggctcgtgcgtccgagcctgtggggccgacagctatgagatggaggaagacggcgtccgcaagtgtaagaagtgcgaagggccttgccgcaaagtgtgtaacggaataggtattggtgaatttaaagactcactctccataaatgctacgaatattaaacacttcaaaaactgcacctccatcagtggcgatctccacatcctgccggtggcatttaggggtgactccttcacacatactcctcctctggatccacaggaactggatattctgaaaaccgtaaaggaaatcacagggtttttgctgattcaggcttggcctgaaaacaggacggacctccatgcctttgagaacctagaaatcatacgcggcaggaccaagcaacatggtcagttttctcttgcagtcgtcagcctgaacataacatccttgggattacgctccctcaaggagataagtgatggagatgtgataatttcaggaaacaaaaatttgtgctatgcaaatacaataaactggaaaaaactgtttgggacctccggtcagaaaaccaaaattataagcaacagaggtgaaaacagctgcaaggccacaggccaggtctgccatgccttgtgctcccccgagggctgctggggcccggagcccagggactgcgtctcttgccggaatgtcagccgaggcagggaatgcgtggacaagtgcaaccttctggagggtgagccaagggagtttgtggagaactctgagtgcatacagtgccacccagagtgcctgcctcaggccatgaacatcacctgcacaggacggggaccagacaactgtatccagtgtgcccactacattgacggcccccactgcgtcaagacctgcccggcaggagtcatgggagaaaacaacaccctggtctggaagtacgcagacgccggccatgtgtgccacctgtgccatccaaactgcacctacggatgcactgggccaggtcttgaaggctgtccaacgaatgggcctaagatcccgtccatcgccactgggatggtgggggccctcctcttgctgctggtggtggccctggggatcggcctcttcatgcgaaggcgccacatcgttcggaagcgcacgctgcggaggctgctgcaggagagggagcttgtggagcctcttacacccagtggagaagctcccaaccaagctctcttgaggatcttgaaggaaactgaattcaaaaagatcaaagtgctgggctccggtgcgttcggcacggtgtataagggactctggatcccagaaggtgagaaagttaaaattcccgtcgctatcaaggaattaagagaagcaacatctccgaaagccaacaaggaaatcctcgatgaagcctacgtgatggccagcgtggacaacccccacgtgtgccgcctgctgggcatctgcctcacctccaccgtgcagctcatcacgcagctcatgcccttcggctgcctcctggactatgtccgggaacacaaagacaatattggctcccagtacctgctcaactggtgtgtgcagatcgcaaagggcatgaactacttggaggaccgtcgcttggtgcaccgcgacctggcagccaggaacgtactggtgaaaacaccgcagcatgtcaagatcacagattttgggctggccaaactgctgggtgcggaagagaaagaataccatgcagaaggaggcaaagtgcctatcaagtggatggcattggaatcaattttacacagaatctatacccaccagagtgatgtctggagctacggggtgaccgtttgggagttgatgacctttggatccaagccatatgacggaatccctgccagcgagatctcctccatcctggagaaaggagaacgcctccctcagccacccatatgtaccatcgatgtctacatgatcatggtcaagtgctggatgatagacgcagatagtcgcccaaagttccgtgagttgatcatcgaattctccaaaatggcccgagacccccagcgctaccttgtcattcagggggatgaaagaatgcatttgccaagtcctacagactccaacttctaccgtgccctgatggatgaagaagacatggacgacgtggtggatgccgacgagtacctcatcccacagcagggcttcttcagcagcccctccacgtcacggactcccctcctgagctctctgagtgcaaccagcaacaattccaccgtggcttgcattgatagaaatgggctgcaaagctgtcccatcaaggaagacagcttcttgcagcgatacagctcagaccccacaggcgccttgactgaggacagcatagacgacaccttcctcccagtgcctgaatacataaaccagtccgttcccaaaaggcccgctggctctgtgcagaatcctgtctatcacaatcagcctctgaaccccgcgcccagcagagacccacactaccaggacccccacagcactgcagtgggcaaccccgagtatctcaacactgtccagcccacctgtgtcaacagcacattcgacagccctgcccactgggcccagaaaggcagccaccaaattagcctggacaaccctgactaccagcaggacttctttcccaaggaagccaagccaaatggcatctttaagggctccacagctgaaaatgcagaatacctaagggtcgcgccacaaagcagtgaatttattggagcatga

SEQ ID NO: 9564 - protein, 1210 aa, Homo sapiens [sequence omitted]

SEQ ID NO: 9565 - DNA, 7245 bp, Homo sapiens
  CDS (1)..(7245)
atggccgagaatgtggtggaaccggggccgccttcagccaagcggcctaaactctcatctccggccctctcggcgtccgccagcgatggcacagattttggctctctatttgacttggagcacgacttaccagatgaattaatcaactctacagaattgggactaaccaatggtggtgatattaatcagcttcagacaagtcttggcatggtacaagatgcagcttctaaacataaacagctgtcagaattgctgcgatctggtagttcccctaacctcaatatgggagttggtggcccaggtcaagtcatggccagccaggcccaacagagcagtcctggattaggtttgataaatagcatggtcaaaagcccaatgacacaggcaggcttgacttctcccaacatggggatgggcactagtggaccaaatcagggtcctacgcagtcaacaggtatgatgaacagtccagtaaatcagcctgccatgggaatgaacacagggatgaatgcgggcatgaatcctggaatgttggctgcaggcaatggacaagggataatgcctaatcaagtcatgaacggttcaattggagcaggccgagggcgacagaatatgcagtacccaaacccaggcatgggaagtgctggcaacttactgactgagcctcttcagcagggctctccccagatgggaggacaaacaggattgagaggcccccagcctcttaagatgggaatgatgaacaaccccaatccttatggttcaccatatactcagaatcctggacagcagattggagccagtggccttggtctccagattcagacaaaaactgtactatcaaataacttatctccatttgctatggacaaaaaggcagttcctggtggaggaatgcccaacatgggtcaacagccagccccgcaggtccagcagccaggcctggtgactccagttgcccaagggatgggttctggagcacatacagctgatccagagaagcgcaagctcatccagcagcagcttgttctccttttgcatgctcacaagtgccagcgccgggaacaggccaatggggaagtgaggcagtgcaaccttccccactgtcgcacaatgaagaatgtcctaaaccacatgacacactgccagtcaggcaagtcttgccaagtggcacactgtgcatcttctcgacaaatcatttcacactggaagaattgtacaagacatgattgtcctgtgtgtctccccctcaaaaatgctggtgataagagaaatcaacagccaattttgactggagcacccgttggacttggaaatcctagctctctaggggtgggtcaacagtctgcccccaacctaagcactgttagtcagattgatcccagctccatagaaagagcctatgcagctcttggactaccctatcaagtaaatcagatgccgacacaaccccaggtgcaagcaaagaaccagcagaatcagcagcctgggcagtctccccaaggcatgcggcccatgagcaacatgagtgctagtcctatgggagtaaatggaggtgtaggagttcaaacgccgagtcttctttctgactcaatgttgcattcagccataaattctcaaaacccaatgatgagtgaaaatgccagtgtgccctccctgggtcctatgccaacagcagctcaaccatccactactggaattcggaaacagtggcacgaagatattactcaggatcttcgaaatcatcttgttcacaaactcgtccaagccatatttcctacgccggatcctgctgctttaaaagacagacggatggaaaacctagttgcatatgctcggaaagttgaaggggacatgtatgaatctgcaaacaatcgagcggaatactaccaccttctagctgagaaaatctataagatccagaaagaactagaagaaaaacgaaggaccagactacagaagcagaacatgctaccaaatgctgcaggcatggttccagtttccatgaatccagggcctaacatgggacagccgcaaccaggaatgacttctaatggccctctacctgacccaagtatgatccgtggcagtgtgccaaaccagatgatgcctcgaataactccacaatctggtttgaatcaatttggccagatgagcatggcccagccccctattgtaccccggcaaacccctcctcttcagcaccatggacagttggctcaacctggagctctcaacccgcctatgggctatgggcctcgtatgcaacagccttccaaccagggccagttccttcctcagactcagttcccatcacagggaatgaatgtaacaaatatccctttggctccgtccagcggtcaagctccagtgtctcaagcacaaatgtctagttcttcctgcccggtgaactctcctataatgcctccagggtctcaggggagccacattcactgtccccagcttcctcaaccagctcttcatcagaattcaccctcgcctgtacctagtcgtacccccacccctcaccatactcccccaagcataggggctcagcagccaccagcaacaacaattccagcccctgttcctacacctcctgccatgccacctgggccacagtcccaggctctacatccccctccaaggcagacacctacaccaccaacaacacaacttccccaacaagtgcagccttcacttcctgctgcaccttctgctgaccagccccagcagcagcctcgctcacagcagagcacagcagcgtctgttcctaccccaacagcaccgctgcttcctccgcagcctgcaactccactttcccagccagctgtaagcattgaaggacaggtatcaaatcctccatctactagtagcacagaagtgaattctcaggccattgctgagaagcagccttcccaggaagtgaagatggaggccaaaatggaagtggatcaaccagaaccagcagatactcagccggaggatatttcagagtctaaagtggaagactgtaaaatggaatctaccgaaacagaagagagaagcactgagttaaaaactgaaataaaagaggaggaagaccagccaagtacttcagctacccagtcatctccggctccaggacagtcaaagaaaaagattttcaaaccagaagaactacgacaggcactgatgccaactttggaggcactttaccgtcaggatccagaatcccttccctttcgtcaacctgtggaccctcagcttttaggaatccctgattactttgatattgtgaagagccccatggatctttctaccattaagaggaagttagacactggacagtatcaggagccctggcagtatgtcgatgatatttggcttatgttcaataatgcctggttatataaccggaaaacatcacgggtatacaaatactgctccaagctctctgaggtctttgaacaagaaattgacccagtgatgcaaagccttggatactgttgtggcagaaagttggagttctctccacagacactgtgttgctacggcaaacagttgtgcacaatacctcgtgatgccacttattacagttaccagaacaggtatcatttctgtgagaagtgtttcaatgagatccaaggggagagcgtttctttgggggatgacccttcccagcctcaaactacaataaataaagaacaattttccaagagaaaaaatgacacactggatcctgaactgtttgttgaatgtacagagtgcggaagaaagatgcatcagatctgtgtccttcaccatgagatcatctggcctgctggattcgtctgtgatggctgtttaaagaaaagtgcacgaactaggaaagaaaataagttttctgctaaaaggttgccatctaccagacttggcacctttctagagaatcgtgtgaatgactttctgaggcgacagaatcaccctgagtcaggagaggtcactgttagagtagttcatgcttctgacaaaaccgtggaagtaaaaccaggcatgaaagcaaggtttgtggacagtggagagatggcagaatcctttccataccgaaccaaagccctctttgcctttgaagaaattgatggtgttgacctgtgcttctttggcatgcatgttcaagagtatggctctgactgccctccacccaaccagaggagagtatacatatcttacctcgatagtgttcatttcttccgtcctaaatgcttgaggactgcagtctatcatgaaatcctaattggatatttagaatatgtcaagaaattaggttacacaacagggcatatttgggcatgtccaccaagtgagggagatgattatatcttccattgccatcctcctgaccagaagatacccaagcccaagcgactgcaggaatggtacaaaaaaatgcttgacaaggctgtatcagagcgtattgtccatgactacaaggatatttttaaacaagctactgaagatagattaacaagtgcaaaggaattgccttatttcgagggtgatttctggcccaatgttctggaagaaagcattaaggaactggaacaggaggaagaagagagaaaacgagaggaaaacaccagcaatgaaagcacagatgtgaccaagggagacagcaaaaatgctaaaaagaagaataataagaaaaccagcaaaaataagagcagcctgagtaggggcaacaagaagaaacccgggatgcccaatgtatctaacgacctctcacagaaactatatgccaccatggagaagcataaagaggtcttctttgtgatccgcctcattgctggccctgctgccaactccctgcctcccattgttgatcctgatcctctcatcccctgcgatctgatggatggtcgggatgcgtttctcacgctggcaagggacaagcacctggagttctcttcactccgaagagcccagtggtccaccatgtgcatgctggtggagctgcacacgcagagccaggaccgctttgtctacacctgcaatgaatgcaagcaccatgtggagacacgctggcactgtactgtctgtgaggattatgacttgtgtatcacctgctataacactaaaaaccatgaccacaaaatggagaaactaggccttggcttagatgatgagagcaacaaccagcaggctgcagccacccagagcccaggcgattctcgccgcctgagtatccagcgctgcatccagtctctggtccatgcttgccagtgtcggaatgccaattgctcactgccatcctgccagaagatgaagcgggttgtgcagcataccaagggttgcaaacggaaaaccaatggcgggtgccccatctgcaagcagctcattgccctctgctgctaccatgccaagcactgccaggagaacaaatgcccggtgccgttctgcctaaacatcaagcagaagctccggcagcaacagctgcagcaccgactacagcaggcccaaatgcttcgcaggaggatggccagcatgcagcggactggtgtggttgggcagcaacagggcctcccttcccccactcctgccactccaacgacaccaactggccaacagccaaccaccccgcagacgccccagcccacttctcagcctcagcctacccctcccaatagcatgccaccctacttgcccaggactcaagctgctggccctgtgtcccagggtaaggcagcaggccaggtgacccctccaacccctcctcagactgctcagccaccccttccagggcccccacctgcagcagtggaaatggcaatgcagattcagagagcagcggagacgcagcgccagatggcccacgtgcaaatttttcaaaggccaatccaacaccagatgcccccgatgactcccatggcccccatgggtatgaacccacctcccatgaccagaggtcccagtgggcatttggagccagggatgggaccgacagggatgcagcaacagccaccctggagccaaggaggattgcctcagccccagcaactacagtctgggatgccaaggccagccatgatgtcagtggcccagcatggtcaacctttgaacatggctccacaaccaggattgggccaggtaggtatcagcccactcaaaccaggcactgtgtctcaacaagccttacaaaaccttttgcggactctcaggtctcccagctctcccctgcagcagcaacaggtgcttagtatccttcacgccaacccccagctgttggctgcattcatcaagcagcgggctgccaagtatgccaactctaatccacaacccatccctgggcagcctggcatgccccaggggcagccagggctacagccacctaccatgccaggtcagcagggggtccactccaatccagccatgcagaacatgaatccaatgcaggcgggcgttcagagggctggcctgccccagcagcaaccacagcagcaactccagccacccatgggagggatgagcccccaggctcagcagatgaacatgaaccacaacaccatgccttcacaattccgagacatcttgagacgacagcaaatgatgcaacagcagcagcaacagggagcagggccaggaataggccctggaatggccaaccataaccagttccagcaaccccaaggagttggctacccaccacagcagcagcagcggatgcagcatcacatgcaacagatgcaacaaggaaatatgggacagataggccagcttccccaggccttgggagcagaggcaggtgccagtctacaggcctatcagcagcgactccttcagcaacagatggggtcccctgttcagcccaaccccatgagcccccagcagcatatgctcccaaatcaggcccagtccccacacctacaaggccagcagatccctaattctctctccaatcaagtgcgctctccccagcctgtcccttctccacggccacagtcccagcccccccactccagtccttccccaaggatgcagcctcagccttctccacaccacgtttccccacagacaagttccccacatcctggactggtagctgcccaggccaaccccatggaacaagggcattttgccagcccggaccagaattcaatgctttctcagcttgctagcaatccaggcatggcaaacctccatggtgcaagcgccacggacctgggactcagcaccgataactcagacttgaattcaaacctctcacagagtacactagacatacactag

SEQ ID NO: 9566 - protein, 2414 aa, Homo sapiens
MAENVVEPGPPSAKRPKLSSPALSASASDGTDFGSLFDLEHDLPDELINSTELGLTNGGDINQLQTSLGMVQDAASKHKQLSELLRSGSSPNLNMGVGGPGQVMASQAQQSSPGLGLINSMVKSPMTQAGLTSPNMGMGTSGPNQGPTQSTGMMNSPVNQPAMGMNTGMNAGMNPGMLAAGNGQGIMPNQVMNGSIGAGRGRQNMQYPNPGMGSAGNLLTEPLQQGSPQMGGQTGLRGPQPLKMGMMNNPNPYGSPYTQNPGQQIGASGLGLQIQTKTVLSNNLSPFAMDKKAVPGGGMPNMGQQPAPQVQQPGLVTPVAQGMGSGAHTADPEKRKLIQQQLVLLLHAHKCQRREQANGEVRQCNLPHCRTMKNVLNHMTHCQSGKSCQVAHCASSRQIISHWKNCTRHDCPVCLPLKNAGDKRNQQPILTGAPVGLGNPSSLGVGQQSAPNLSTVSQIDPSSIERAYAALGLPYQVNQMPTQPQVQAKNQQNQQPGQSPQGMRPMSNMSASPMGVNGGVGVQTPSLLSDSMLHSAINSQNPMMSENASVPSLGPMPTAAQPSTTGIRKQWHEDITQDLRNHLVHKLVQAIFPTPDPAALKDRRMENLVAYARKVEGDMYESANNRAEYYHLLAEKIYKIQKELEEKRRTRLQKQNMLPNAAGMVPVSMNPGPNMGQPQPGMTSNGPLPDPSMIRGSVPNQMMPRITPQSGLNQFGQMSMAQPPIVPRQTPPLQHHGQLAQPGALNPPMGYGPRMQQPSNQGQFLPQTQFPSQGMNVTNIPLAPSSGQAPVSQAQMSSSSCPVNSPIMPPGSQGSHIHCPQLPQPALHQNSPSPVPSRTPTPHHTPPSIGAQQPPATTIPAPVPTPPAMPPGPQSQALHPPPRQTPTPPTTQLPQQVQPSLPAAPSADQPQQQPRSQQSTAASVPTPTAPLLPPQPATPLSQPAVSIEGQVSNPPSTSSTEVNSQAIAEKQPSQEVKMEAKMEVDQPEPADTQPEDISESKVEDCKMESTETEERSTELKTEIKEEEDQPSTSATQSSPAPGQSKKKIFKPEELRQALMPTLEALYRQDPESLPFRQPVDPQLLGIPDYFDIVKSPMDLSTIKRKLDTGQYQEPWQYVDDIWLMFNNAWLYNRKTSRVYKYCSKLSEVFEQEIDPVMQSLGYCCGRKLEFSPQTLCCYGKQLCTIPRDATYYSYQNRYHFCEKCFNEIQGESVSLGDDPSQPQTTINKEQFSKRKNDTLDPELFVECTECGRKMHQICVLHHEIIWPAGFVCDGCLKKSARTRKENKFSAKRLPSTRLGTFLENRVNDFLRRQNHPESGEVTVRVVHASDKTVEVKPGMKARFVDSGEMAESFPYRTKALFAFEEIDGVDLCFFGMHVQEYGSDCPPPNQRRVYISYLDSVHFFRPKCLRTAVYHEILIGYLEYVKKLGYTTGHIWACPPSEGDDYIFHCHPPDQKIPKPKRLQEWYKKMLDKAVSERIVHDYKDIFKQATEDRLTSAKELPYFEGDFWPNVLEESIKELEQEEEERKREENTSNESTDVTKGDSKNAKKKNNKKTSKNKSSLSRGNKKKPGMPNVSNDLSQKLYATMEKHKEVFFVIRLIAGPAANSLPPIVDPDPLIPCDLMDGRDAFLTLARDKHLEFSSLRRAQWSTMCMLVELHTQSQDRFVYTCNECKHHVETRWHCTVCEDYDLCITCYNTKNHDHKMEKLGLGLDDESNNQQAAATQSPGDSRRLSIQRCIQSLVHACQCRNANCSLPSCQKMKRVVQHTKGCKRKTNGGCPICKQLIALCCYHAKHCQENKCPVPFCLNIKQKLRQQQLQHRLQQAQMLRRRMASMQRTGVVGQQQGLPSPTPATPTTPTGQQPTTPQTPQPTSQPQPTPPNSMPPYLPRTQAAGPVSQGKAAGQVTPPTPPQTAQPPLPGPPPAAVEMAMQIQRAAETQRQMAHVQIFQRPIQHQMPPMTPMAPMGMNPPPMTRGPSGHLEPGMGPTGMQQQPPWSQGGLPQPQQLQSGMPRPAMMSVAQHGQPLNMAPQPGLGQVGISPLKPGTVSQQALQNLLRTLRSPSSPLQQQQVLSILHANPQLLAAFIKQRAAKYANSNPQPIPGQPGMPQGQPGLQPPTMPGQQGVHSNPAMQNMNPMQAGVQRAGLPQQQPQQQLQPPMGGMSPQAQQMNMNHNTMPSQFRDILRRQQMMQQQQQQGAGPGIGPGMANHNQFQQPQGVGYPPQQQQRMQHHMQQMQQGNMGQIGQLPQALGAEAGASLQAYQQRLLQQQMGSPVQPNPMSPQQHMLPNQAQSPHLQGQQIPNSLSNQVRSPQPVPSPRPQSQPPHSSPSPRMQPQPSPHHVSPQTSSPHPGLVAAQANPMEQGHFASPDQNSMLSQLASNPGMANLHGASATDLGLSTDNSDLNSNLSQSTLDIH

SEQ ID NO: 9567 - DNA, 3765 bp, Homo sapiens
  CDS (1)..(3765)
atggagctggcggccttgtgccgctgggggctcctcctcgccctcttgccccccggagccgcgagcacccaagtgtgcaccggcacagacatgaagctgcggctccctgccagtcccgagacccacctggacatgctccgccacctctaccagggctgccaggtggtgcagggaaacctggaactcacctacctgcccaccaatgccagcctgtccttcctgcaggatatccaggaggtgcagggctacgtgctcatcgctcacaaccaagtgaggcaggtcccactgcagaggctgcggattgtgcgaggcacccagctctttgaggacaactatgccctggccgtgctagacaatggagacccgctgaacaataccacccctgtcacaggggcctccccaggaggcctgcgggagctgcagcttcgaagcctcacagagatcttgaaaggaggggtcttgatccagcggaacccccagctctgctaccaggacacgattttgtggaaggacatcttccacaagaacaaccagctggctctcacactgatagacaccaaccgctctcgggcctgccacccctgttctccgatgtgtaagggctcccgctgctggggagagagttctgaggattgtcagagcctgacgcgcactgtctgtgccggtggctgtgcccgctgcaaggggccactgcccactgactgctgccatgagcagtgtgctgccggctgcacgggccccaagcactctgactgcctggcctgcctccacttcaaccacagtggcatctgtgagctgcactgcccagccctggtcacctacaacacagacacgtttgagtccatgcccaatcccgagggccggtatacattcggcgccagctgtgtgactgcctgtccctacaactacctttctacggacgtgggatcctgcaccctcgtctgccccctgcacaaccaagaggtgacagcagaggatggaacacagcggtgtgagaagtgcagcaagccctgtgcccgagtgtgctatggtctgggcatggagcacttgcgagaggtgagggcagttaccagtgccaatatccaggagtttgctggctgcaagaagatctttgggagcctggcatttctgccggagagctttgatggggacccagcctccaacactgccccgctccagccagagcagctccaagtgtttgagactctggaagagatcacaggttacctatacatctcagcatggccggacagcctgcctgacctcagcgtcttccagaacctgcaagtaatccggggacgaattctgcacaatggcgcctactcgctgaccctgcaagggctgggcatcagctggctggggctgcgctcactgagggaactgggcagtggactggccctcatccaccataacacccacctctgcttcgtgcacacggtgccctgggaccagctctttcggaacccgcaccaagctctgctccacactgccaaccggccagaggacgagtgtgtgggcgagggcctggcctgccaccagctgtgcgcccgagggcactgctggggtccagggcccacccagtgtgtcaactgcagccagttccttcggggccaggagtgcgtggaggaatgccgagtactgcaggggctccccagggagtatgtgaatgccaggcactgtttgccgtgccaccctgagtgtcagccccagaatggctcagtgacctgttttggaccggaggctgaccagtgtgtggcctgtgcccactataaggaccctcccttctgcgtggcccgctgccccagcggtgtgaaacctgacctctcctacatgcccatctggaagtttccagatgaggagggcgcatgccagccttgccccatcaactgcacccactcctgtgtggacctggatgacaagggctgccccgccgagcagagagccagccctctgacgtccatcatctctgcggtggttggcattctgctggtcgtggtcttgggggtggtctttgggatcctcatcaagcgacggcagcagaagatccggaagtacacgatgcggagactgctgcaggaaacggagctggtggagccgctgacacctagcggagcgatgcccaaccaggcgcagatgcggatcctgaaagagacggagctgaggaaggtgaaggtgcttggatctggcgcttttggcacagtctacaagggcatctggatccctgatggggagaatgtgaaaattccagtggccatcaaagtgttgagggaaaacacatcccccaaagccaacaaagaaatcttagacgaagcatacgtgatggctggtgtgggctccccatatgtctcccgccttctgggcatctgcctgacatccacggtgcagctggtgacacagcttatgccctatggctgcctcttagaccatgtccgggaaaaccgcggacgcctgggctcccaggacctgctgaactggtgtatgcagattgccaaggggatgagctacctggaggatgtgcggctcgtacacagggacttggccgctcggaacgtgctggtcaagagtcccaaccatgtcaaaattacagacttcgggctggctcggctgctggacattgacgagacagagtaccatgcagatgggggcaaggtgcccatcaagtggatggcgctggagtccattctccgccggcggttcacccaccagagtgatgtgtggagttatggtgtgactgtgtgggagctgatgacttttggggccaaaccttacgatgggatcccagcccgggagatccctgacctgctggaaaagggggagcggctgccccagccccccatctgcaccattgatgtctacatgatcatggtcaaatgttggatgattgactctgaatgtcggccaagattccgggagttggtgtctgaattctcccgcatggccagggacccccagcgctttgtggtcatccagaatgaggacttgggcccagccagtcccttggacagcaccttctaccgctcactgctggaggacgatgacatgggggacctggtggatgctgaggagtatctggtaccccagcagggcttcttctgtccagaccctgccccgggcgctgggggcatggtccaccacaggcaccgcagctcatctaccaggagtggcggtggggacctgacactagggctggagccctctgaagaggaggcccccaggtctccactggcaccctccgaaggggctggctccgatgtatttgatggtgacctgggaatgggggcagccaaggggctgcaaagcctccccacacatgaccccagccctctacagcggtacagtgaggaccccacagtacccctgccctctgagactgatggctacgttgcccccctgacctgcagcccccagcctgaatatgtgaaccagccagatgttcggccccagcccccttcgccccgagagggccctctgcctgctgcccgacctgctggtgccactctggaaaggcccaagactctctccccagggaagaatggggtcgtcaaagacgtttttgcctttgggggtgccgtggagaaccccgagtacttgacaccccagggaggagctgcccctcagccccaccctcctcctgccttcagcccagccttcgacaacctctattactgggaccaggacccaccagagcggggggctccacccagcaccttcaaagggacacctacggcagagaacccagagtacctgggtctggacgtgccagtg

SEQ ID NO: 9568 - protein, 1255 aa, Homo sapiens [sequence omitted]

SEQ ID NO: 9569 - DNA, 4026 bp, Homo sapiens
  CDS (1)..(4026)
atgagggcgaacgacgctctgcaggtgctgggcttgcttttcagcctggcccggggctccgaggtgggcaactctcaggcagtgtgtcctgggactctgaatggcctgagtgtgaccggcgatgctgagaaccaataccagacactgtacaagctctacgagaggtgtgaggtggtgatggggaaccttgagattgtgctcacgggacacaatgccgacctctccttcctgcagtggattcgagaagtgacaggctatgtcctcgtggccatgaatgaattctctactctaccattgcccaacctccgcgtggtgcgagggacccaggtctacgatgggaagtttgccatcttcgtcatgttgaactataacaccaactccagccacgctctgcgccagctccgcttgactcagctcaccgagattctgtcagggggtgtttatattgagaagaacgataagctttgtcacatggacacaattgactggagggacatcgtgagggaccgagatgctgagatagtggtgaaggacaatggcagaagctgtcccccctgtcatgaggtttgcaaggggcgatgctggggtcctggatcagaagactgccagacattgaccaagaccatctgtgctcctcagtgtaatggtcactgctttgggcccaaccccaaccagtgctgccatgatgagtgtgccgggggctgctcaggccctcaggacacagactgctttgcctgccggcacttcaatgacagtggagcctgtgtacctcgctgtccacagcctcttgtctacaacaagctaactttccagctggaacccaatccccacaccaagtatcagtatggaggagtttgtgtagccagctgtccccataactttgtggtggatcaaacatcctgtgtcagggcctgtcctcctgacaagatggaagtagataaaaatgggctcaagatgtgtgagccttgtgggggactatgtcccaaagcctgtgagggaacaggctctgggagccgcttccagactgtggactcgagcaacattgatggatttgtgaactgcaccaagatcctgggcaacctggactttctgatcaccggcctcaatggagacccctggcacaagatccctgccctggacccagagaagctcaatgtcttccggacagtacgggagatcacaggttacctgaacatccagtcctggccgccccacatgcacaacttcagtgttttttccaatttgacaaccattggaggcagaagcctctacaaccggggcttctcattgttgatcatgaagaacttgaatgtcacatctctgggcttccgatccctgaaggaaattagtgctgggcgtatctatataagtgccaataggcagctctgctaccaccactctttgaactggaccaaggtgcttcgggggcctacggaagagcgactagacatcaagcataatcggccgcgcagagactgcgtggcagagggcaaagtgtgtgacccactgtgctcctctgggggatgctggggcccaggccctggtcagtgcttgtcctgtcgaaattatagccgaggaggtgtctgtgtgacccactgcaactttctgaatggggagcctcgagaatttgcccatgaggccgaatgcttctcctgccacccggaatgccaacccatggagggcactgccacatgcaatggctcgggctctgatacttgtgctcaatgtgcccattttcgagatgggccccactgtgtgagcagctgcccccatggagtcctaggtgccaagggcccaatctacaagtacccagatgttcagaatgaatgtcggccctgccatgagaactgcacccaggggtgtaaaggaccagagcttcaagactgtttaggacaaacactggtgctgatcggcaaaacccatctgacaatggctttgacagtgatagcaggattggtagtgattttcatgatgctgggcggcacttttctctactggcgtgggcgccggattcagaataaaagggctatgaggcgatacttggaacggggtgagagcatagagcctctggaccccagtgagaaggctaacaaagtcttggccagaatcttcaaagagacagagctaaggaagcttaaagtgcttggctcgggtgtctttggaactgtgcacaaaggagtgtggatccctgagggtgaatcaatcaagattccagtctgcattaaagtcattgaggacaagagtggacggcagagttttcaagctgtgacagatcatatgctggccattggcagcctggaccatgcccacattgtaaggctgctgggactatgcccagggtcatctctgcagcttgtcactcaatatttgcctctgggttctctgctggatcatgtgagacaacaccggggggcactggggccacagctgctgctcaactggggagtacaaattgccaagggaatgtactaccttgaggaacatggtatggtgcatagaaacctggctgcccgaaacgtgctactcaagtcacccagtcaggttcaggtggcagattttggtgtggctgacctgctgcctcctgatgataagcagctgctatacagtgaggccaagactccaattaagtggatggcccttgagagtatccactttgggaaatacacacaccagagtgatgtctggagctatggtgtgacagtttgggagttgatgaccttcggggcagagccctatgcagggctacgattggctgaagtaccagacctgctagagaagggggagcggttggcacagccccagatctgcacaattgatgtctacatggtgatggtcaagtgttggatgattgatgagaacattcgcccaacctttaaagaactagccaatgagttcaccaggatggcccgagacccaccacggtatctggtcataaagagagagagtgggcctggaatagcccctgggccagagccccatggtctgacaaacaagaagctagaggaagtagagctggagccagaactagacctagacctagacttggaagcagaggaggacaacctggcaaccaccacactgggctccgccctcagcctaccagttggaacacttaatcggccacgtgggagccagagccttttaagtccatcatctggatacatgcccatgaaccagggtaatcttggggagtcttgccaggagtctgcagtttctgggagcagtgaacggtgcccccgtccagtctctctacacccaatgccacggggatgcctggcatcagagtcatcagaggggcatgtaacaggctctgaggctgagctccaggagaaagtgtcaatgtgtaggagccggagcaggagccggagcccacggccacgcggagatagcgcctaccattcccagcgccacagtctgctgactcctgttaccccactctccccacccgggttagaggaagaggatgtcaacggttatgtcatgccagatacacacctcaaaggtactccctcctcccgggaaggcaccctttcttcagtgggtctcagttctgtcctgggtactgaagaagaagatgaagatgaggagtatgaatacatgaaccggaggagaaggcacagtccacctcatccccctaggccaagttcccttgaggagctgggttatgagtacatggatgtggggtcagacctcagtgcctctctgggcagcacacagagttgcccactccaccctgtacccatcatgcccactgcaggcacaactccagatgaagactatgaatatatgaatcggcaacgagatggaggtggtcctgggggtgattatgcagccatgggggcctgcccagcatctgagcaagggtatgaagagatgagagcttttcaggggcctggacatcaggccccccatgtccattatgcccgcctaaaaactctacgtagcttagaggctacagactctgcctttgataaccctgattactggcatagcaggcttttccccaaggctaatgcccagagaacg

SEQ ID NO: 9570 - protein, 1342 aa, Homo sapiens
MRANDALQVLGLLFSLARGSEVGNSQAVCPGTLNGLSVTGDAENQYQTLYKLYERCEVVMGNLEIVLTGHNADLSFLQWIREVTGYVLVAMNEFSTLPLPNLRVVRGTQVYDGKFAIFVMLNYNTNSSHALRQLRLTQLTEILSGGVYIEKNDKLCHMDTIDWRDIVRDRDAEIVVKDNGRSCPPCHEVCKGRCWGPGSEDCQTLTKTICAPQCNGHCFGPNPNQCCHDECAGGCSGPQDTDCFACRHFNDSGACVPRCPQPLVYNKLTFQLEPNPHTKYQYGGVCVASCPHNFVVDQTSCVRACPPDKMEVDKNGLKMCEPCGGLCPKACEGTGSGSRFQTVDSSNIDGFVNCTKILGNLDFLITGLNGDPWHKIPALDPEKLNVFRTVREITGYLNIQSWPPHMHNFSVFSNLTTIGGRSLYNRGFSLLIMKNLNVTSLGFRSLKEISAGRIYISANRQLCYHHSLNWTKVLRGPTEERLDIKHNRPRRDCVAEGKVCDPLCSSGGCWGPGPGQCLSCRNYSRGGVCVTHCNFLNGEPREFAHEAECFSCHPECQPMEGTATCNGSGSDTCAQCAHFRDGPHCVSSCPHGVLGAKGPIYKYPDVQNECRPCHENCTQGCKGPELQDCLGQTLVLIGKTHLTMALTVIAGLVVIFMMLGGTFLYWRGRRIQNKRAMRRYLERGESIEPLDPSEKANKVLARIFKETELRKLKVLGSGVFGTVHKGVWIPEGESIKIPVCIKVIEDKSGRQSFQAVTDHMLAIGSLDHAHIVRLLGLCPGSSLQLVTQYLPLGSLLDHVRQHRGALGPQLLLNWGVQIAKGMYYLEEHGMVHRNLAARNVLLKSPSQVQVADFGVADLLPPDDKQLLYSEAKTPIKWMALESIHFGKYTHQSDVWSYGVTVWELMTFGAEPYAGLRLAEVPDLLEKGERLAQPQICTIDVYMVMVKCWMIDENIRPTFKELANEFTRMARDPPRYLVIKRESGPGIAPGPEPHGLTNKKLEEVELEPELDLDLDLEAEEDNLATTTLGSALSLPVGTLNRPRGSQSLLSPSSGYMPMNQGNLGESCQESAVSGSSERCPRPVSLHPMPRGCLASESSEGHVTGSEAELQEKVSMCRSRSRSRSPRPRGDSAYHSQRHSLLTPVTPLSPPGLEEEDVNGYVMPDTHLKGTPSSREGTLSSVGLSSVLGTEEEDEDEEYEYMNRRRRHSPPHPPRPSSLEELGYEYMDVGSDLSASLGSTQSCPLHPVPIMPTAGTTPDEDYEYMNRQRDGGGPGGDYAAMGACPASEQGYEEMRAFQGPGHQAPHVHYARLKTLRSLEATDSAFDNPDYWHSRLFPKANAQRT

SEQ ID NO: 9571 - DNA, 3924 bp, Homo sapiens
  CDS (1)..(3924)
atgaagccggcgacaggactttgggtctgggtgagccttctcgtggcggcggggaccgtccagcccagcgattctcagtcagtgtgtgcaggaacggagaataaactgagctctctctctgacctggaacagcagtaccgagccttgcgcaagtactatgaaaactgtgaggttgtcatgggcaacctggagataaccagcattgagcacaaccgggacctctccttcctgcggtctgttcgagaagtcacaggctacgtgttagtggctcttaatcagtttcgttacctgcctctggagaatttacgcattattcgtgggacaaaactttatgaggatcgatatgccttggcaatatttttaaactacagaaaagatggaaactttggacttcaagaacttggattaaagaacttgacagaaatcctaaatggtggagtctatgtagaccagaacaaattcctttgttatgcagacaccattcattggcaagatattgttcggaacccatggccttccaacttgactcttgtgtcaacaaatggtagttcaggatgtggacgttgccataagtcctgtactggccgttgctggggacccacagaaaatcattgccagactttgacaaggacggtgtgtgcagaacaatgtgacggcagatgctacggaccttacgtcagtgactgctgccatcgagaatgtgctggaggctgctcaggacctaaggacacagactgctttgcctgcatgaatttcaatgacagtggagcatgtgttactcagtgtccccaaacctttgtctacaatccaaccacctttcaactggagcacaatttcaatgcaaagtacacatatggagcattctgtgtcaagaaatgtccacataactttgtggtagattccagttcttgtgtgcgtgcctgccctagttccaagatggaagtagaagaaaatgggattaaaatgtgtaaaccttgcactgacatttgcccaaaagcttgtgatggcattggcacaggatcattgatgtcagctcagactgtggattccagtaacattgacaaattcataaactgtaccaagatcaatgggaatttgatctttctagtcactggtattcatggggacccttacaatgcaattgaagccatagacccagagaaactgaacgtctttcggacagtcagagagataacaggtttcctgaacatacagtcatggccaccaaacatgactgacttcagtgttttttctaacctggtgaccattggtggaagagtactctatagtggcctgtccttgcttatcctcaagcaacagggcatcacctctctacagttccagtccctgaaggaaatcagcgcaggaaacatctatattactgacaacagcaacctgtgttattatcataccattaactggacaacactcttcagcacaatcaaccagagaatagtaatccgggacaacagaaaagctgaaaattgtactgctgaaggaatggtgtgcaaccatctgtgttccagtgatggctgttggggacctgggccagaccaatgtctgtcgtgtcgccgcttcagtagaggaaggatctgcatagagtcttgtaacctctatgatggtgaatttcgggagtttgagaatggctccatctgtgtggagtgtgacccccagtgtgagaagatggaagatggcctcctcacatgccatggaccgggtcctgacaactgtacaaagtgctctcattttaaagatggcccaaactgtgtggaaaaatgtccagatggcttacagggggcaaacagtttcattttcaagtatgctgatccagatcgggagtgccacccatgccatccaaactgcacccaagggtgtaacggtcccactagtcatgactgcatttactacccatggacgggccattccactttaccacaacatgctagaactcccctgattgcagctggagtaattggtgggctcttcattctggtcattgtgggtctgacatttgctgtttatgttagaaggaagagcatcaaaaagaaaagagccttgagaagattcttggaaacagagttggtggaaccattaactcccagtggcacagcacccaatcaagctcaacttcgtattttgaaagaaactgagctgaagagggtaaaagtccttggctcaggtgcttttggaacggtttataaaggtatttgggtacctgaaggagaaactgtgaagattcctgtggctattaagattcttaatgagacaactggtcccaaggcaaatgtggagttcatggatgaagctctgatcatggcaagtatggatcatccacacctagtccggttgctgggtgtgtgtctgagcccaaccatccagctggttactcaacttatgccccatggctgcctgttggagtatgtccacgagcacaaggataacattggatcacaactgctgcttaactggtgtgtccagatagctaagggaatgatgtacctggaagaaagacgactcgttcatcgggatttggcagcccgtaatgtcttagtgaaatctccaaaccatgtgaaaatcacagattttgggctagccagactcttggaaggagatgaaaaagagtacaatgctgatggaggaaagatgccaattaaatggatggctctggagtgtatacattacaggaaattcacccatcagagtgacgtttggagctatggagttactatatgggaactgatgacctttggaggaaaaccctatgatggaattccaacgcgagaaatccctgatttattagagaaaggagaacgtttgcctcagcctcccatctgcactattgacgtttacatggtcatggtcaaatgttggatgattgatgctgacagtagacctaaatttaaggaactggctgctgagttttcaaggatggctcgagaccctcaaagatacctagttattcagggtgatgatcgtatgaagcttcccagtccaaatgacagcaagttctttcagaatctcttggatgaagaggatttggaagatatgatggatgctgaggagtacttggtccctcaggctttcaacatcccacctcccatctatacttccagagcaagaattgactcgaataggagtgaaattggacacagccctcctcctgcctacacccccatgtcaggaaaccagtttgtataccgagatggaggttttgctgctgaacaaggagtgtctgtgccctacagagccccaactagcacaattccagaagctcctgtggcacagggtgctactgctgagatttttgatgactcctgctgtaatggcaccctacgcaagccagtggcaccccatgtccaagaggacagtagcacccagaggtacagtgctgaccccaccgtgtttgccccagaacggagcccacgaggagagctggatgaggaaggttacatgactcctatgcgagacaaacccaaacaagaatacctgaatccagtggaggagaacccttttgtttctcggagaaaaaatggagaccttcaagcattggataatcccgaatatcacaatgcatccaatggtccacccaaggccgaggatgagtatgtgaatgagccactgtacctcaacacctttgccaacaccttgggaaaagctgagtacctgaagaacaacatactgtcaatgccagagaaggccaagaaagcgtttgacaaccctgactactggaaccacagcctgccacctcggagcacccttcagcacccagactacctgcaggagtacagcacaaaatatttttataaacagaatgggcggatccggcctattgtggcagagaatcctgaatacctctctgagttctccctgaagccaggcactgtgctgccgcctccaccttacagacaccggaatactgtggtg

SEQ ID NO: 9572 - protein, 1308 aa, Homo sapiens
MKPATGLWVWVSLLVAAGTVQPSDSQSVCAGTENKLSSLSDLEQQYRALRKYYENCEVVMGNLEITSIEHNRDLSFLRSVREVTGYVLVALNQFRYLPLENLRIIRGTKLYEDRYALAIFLNYRKDGNFGLQELGLKNLTEILNGGVYVDQNKFLCYADTIHWQDIVRNPWPSNLTLVSTNGSSGCGRCHKSCTGRCWGPTENHCQTLTRTVCAEQCDGRCYGPYVSDCCHRECAGGCSGPKDTDCFACMNFNDSGACVTQCPQTFVYNPTTFQLEHNFNAKYTYGAFCVKKCPHNFVVDSSSCVRACPSSKMEVEENGIKMCKPCTDICPKACDGIGTGSLMSAQTVDSSNIDKFINCTKINGNLIFLVTGIHGDPYNAIEAIDPEKLNVFRTVREITGFLNIQSWPPNMTDFSVFSNLVTIGGRVLYSGLSLLILKQQGITSLQFQSLKEISAGNIYITDNSNLCYYHTINWTTLFSTINQRIVIRDNRKAENCTAEGMVCNHLCSSDGCWGPGPDQCLSCRRFSRGRICIESCNLYDGEFREFENGSICVECDPQCEKMEDGLLTCHGPGPDNCTKCSHFKDGPNCVEKCPDGLQGANSFIFKYADPDRECHPCHPNCTQGCNGPTSHDCIYYPWTGHSTLPQHARTPLIAAGVIGGLFILVIVGLTFAVYVRRKSIKKKRALRRFLETELVEPLTPSGTAPNQAQLRILKETELKRVKVLGSGAFGTVYKGIWVPEGETVKIPVAIKILNETTGPKANVEFMDEALIMASMDHPHLVRLLGVCLSPTIQLVTQLMPHGCLLEYVHEHKDNIGSQLLLNWCVQIAKGMMYLEERRLVHRDLAARNVLVKSPNHVKITDFGLARLLEGDEKEYNADGGKMPIKWMALECIHYRKFTHQSDVWSYGVTIWELMTFGGKPYDGIPTREIPDLLEKGERLPQPPICTIDVYMVMVKCWMIDADSRPKFKELAAEFSRMARDPQRYLVIQGDDRMKLPSPNDSKFFQNLLDEEDLEDMMDAEEYLVPQAFNIPPPIYTSRARIDSNRSEIGHSPPPAYTPMSGNQFVYRDGGFAAEQGVSVPYRAPTSTIPEAPVAQGATAEIFDDSCCNGTLRKPVAPHVQEDSSTQRYSADPTVFAPERSPRGELDEEGYMTPMRDKPKQEYLNPVEENPFVSRRKNGDLQALDNPEYHNASNGPPKAEDEYVNEPLYLNTFANTLGKAEYLKNNILSMPEKAKKAFDNPDYWNHSLPPRSTLQHPDYLQEYSTKYFYKQNGRIRPIVAENPEYLSEFSLKPGTVLPPPPYRHRNTVV

SEQ ID NO: 9573 - DNA, 2124 bp, Homo sapiens
  CDS (1)..(2124)
atgaatcaggaactgctctctgtgggcagcaaaagacgacgaactggaggctctctgagaggtaacccttcctcaagccaggtagatgaagaacagatgaatcgtgtggtagaggaggaacagcaacagcaactcagacaacaagaggaggagcacactgcaaggaatggtgaagttgttggagtagaacctagacctggaggccaaaatgattcccagcaaggacagttggaagaaaacaataatagatttatttcggtagatgaggactcctcaggaaaccaagaagaacaagaggaagatgaagaacatgctggtgaacaagatgaggaggatgaggaggaggaggagatggaccaggagagtgacgattttgatcagtctgatgatagtagcagagaagatgaacatacacatactaacagtgtcacgaactccagtagtattgtggacctgcccgttcaccaactctcctccccattctatacaaaaacaacaaaaatgaaaagaaagttggaccatggttctgaggtccgctctttttctttgggaaagaaaccatgcaaagtctcagaatatacaagtaccactgggcttgtaccatgttcagcaacaccaacaacttttggggacctcagagcagccaatggccaagggcaacaacgacgccgaattacatctgtccagccacctacaggcctccaggaatggctaaaaatgtttcagagctggagtggaccagagaaattgcttgctttagatgaactcattgatagttgtgaaccaacacaagtaaaacatatgatgcaagtgatagaaccccagtttcaacgagacttcatttcattgctccctaaagagttggcactctatgtgctttcattcctggaacccaaagacctgctacaagcagctcagacatgtcgctactggagaattttggctgaagacaaccttctctggagagagaaatgcaaagaagaggggattgatgaaccattgcacatcaagagaagaaaagtaataaaaccaggtttcatacacagtccatggaaaagtgcatacatcagacagcacagaattgatactaactggaggcgaggagaactcaaatctcctaaggtgctgaaaggacatgatgatcatgtgatcacatgcttacagttttgtggtaaccgaatagttagtggttctgatgacaacactttaaaagtttggtcagcagtcacaggcaaatgtctgagaacattagtgggacatacaggtggagtatggtcatcacaaatgagagacaacatcatcattagtggatctacagatcggacactcaaagtgtggaatgcagagactggagaatgtatacacaccttatatgggcatacttccactgtgcgttgtatgcatcttcatgaaaaaagagttgttagcggttctcgagatgccactcttagggtttgggatattgagacaggccagtgtttacatgttttgatgggtcatgttgcagcagtccgctgtgttcaatatgatggcaggagggttgttagtggagcatatgattttatggtaaaggtgtgggatccagagactgaaacctgtctacacacgttgcaggggcatactaatagagtctattcattacagtttgatggtatccatgtggtgagtggatctcttgatacatcaatccgtgtttgggatgtggagacagggaattgcattcacacgttaacagggcaccagtcgttaacaagtggaatggaactcaaagacaatattcttgtctctgggaatgcagattctacagttaaaatctgggatatcaaaacaggacagtgtttacaaacattgcaaggtcccaacaagcatcagagtgctgtgacctgtttacagttcaacaagaactttgtaattaccagctcagatgatggaactgtaaaactatgggacttgaaaacgggtgaatttattcgaaacctagtcacattggagagtggggggagtgggggagttgtgtggcggatcagagcctcaaacacaaagctggtgtgtgcagttgggagtcggaatgggactgaagaaaccaagctgctggtgctggactttgatgtggacatgaagtga

SEQ ID NO: 9574 - protein, 707 aa, Homo sapiens
MNQELLSVGSKRRRTGGSLRGNPSSSQVDEEQMNRVVEEEQQQQLRQQEEEHTARNGEVVGVEPRPGGQNDSQQGQLEENNNRFISVDEDSSGNQEEQEEDEEHAGEQDEEDEEEEEMDQESDDFDQSDDSSREDEHTHTNSVTNSSSIVDLPVHQLSSPFYTKTTKMKRKLDHGSEVRSFSLGKKPCKVSEYTSTTGLVPCSATPTTFGDLRAANGQGQQRRRITSVQPPTGLQEWLKMFQSWSGPEKLLALDELIDSCEPTQVKHMMQVIEPQFQRDFISLLPKELALYVLSFLEPKDLLQAAQTCRYWRILAEDNLLWREKCKEEGIDEPLHIKRRKVIKPGFIHSPWKSAYIRQHRIDTNWRRGELKSPKVLKGHDDHVITCLQFCGNRIVSGSDDNTLKVWSAVTGKCLRTLVGHTGGVWSSQMRDNIIISGSTDRTLKVWNAETGECIHTLYGHTSTVRCMHLHEKRVVSGSRDATLRVWDIETGQCLHVLMGHVAAVRCVQYDGRRVVSGAYDFMVKVWDPETETCLHTLQGHTNRVYSLQFDGIHVVSGSLDTSIRVWDVETGNCIHTLTGHQSLTSGMELKDNILVSGNADSTVKIWDIKTGQCLQTLQGPNKHQSAVTCLQFNKNFVITSSDDGTVKLWDLKTGEFIRNLVTLESGGSGGVVWRIRASNTKLVCAVGSRNGTEETKLLVLDFDVDMK

SEQ ID NO: 9575 - DNA, 2466 bp, Homo sapiens
  CDS (1)..(2466)
atggtcagctggggtcgtttcatctgcctggtcgtggtcaccatggcaaccttgtccctggcccggccctccttcagtttagttgaggataccacattagagccagaagagccaccaaccaaataccaaatctctcaaccagaagtgtacgtggctgcgccaggggagtcgctagaggtgcgctgcctgttgaaagatgccgccgtgatcagttggactaaggatggggtgcacttggggcccaacaataggacagtgcttattggggagtacttgcagataaagggcgccacgcctagagactccggcctctatgcttgtactgccagtaggactgtagacagtgaaacttggtacttcatggtgaatgtcacagatgccatctcatccggagatgatgaggatgacaccgatggtgcggaagattttgtcagtgagaacagtaacaacaagagagcaccatactggaccaacacagaaaagatggaaaagcggctccatgctgtgcctgcggccaacactgtcaagtttcgctgcccagccggggggaacccaatgccaaccatgcggtggctgaaaaacgggaaggagtttaagcaggagcatcgcattggaggctacaaggtacgaaaccagcactggagcctcattatggaaagtgtggtcccatctgacaagggaaattatacctgtgtagtggagaatgaatacgggtccatcaatcacacgtaccacctggatgttgtggagcgatcgcctcaccggcccatcctccaagccggactgccggcaaatgcctccacagtggtcggaggagacgtagagtttgtctgcaaggtttacagtgatgcccagccccacatccagtggatcaagcacgtggaaaagaacggcagtaaatacgggcccgacgggctgccctacctcaaggttctcaagcactcggggataaatagttccaatgcagaagtgctggctctgttcaatgtgaccgaggcggatgctggggaatatatatgtaaggtctccaattatatagggcaggccaaccagtctgcctggctcactgtcctgccaaaacagcaagcgcctggaagagaaaaggagattacagcttccccagactacctggagatagccatttactgcataggggtcttcttaatcgcctgtatggtggtaacagtcatcctgtgccgaatgaagaacacgaccaagaagccagacttcagcagccagccggctgtgcacaagctgaccaaacgtatccccctgcggagacaggtaacagtttcggctgagtccagctcctccatgaactccaacaccccgctggtgaggataacaacacgcctctcttcaacggcagacacccccatgctggcaggggtctccgagtatgaacttccagaggacccaaaatgggagtttccaagagataagctgacactgggcaagcccctgggagaaggttgctttgggcaagtggtcatggcggaagcagtgggaattgacaaagacaagcccaaggaggcggtcaccgtggccgtgaagatgttgaaagatgatgccacagagaaagacctttctgatctggtgtcagagatggagatgatgaagatgattgggaaacacaagaatatcataaatcttcttggagcctgcacacaggatgggcctctctatgtcatagttgagtatgcctctaaaggcaacctccgagaatacctccgagcccggaggccacccgggatggagtactcctatgacattaaccgtgttcctgaggagcagatgaccttcaaggacttggtgtcatgcacctaccagctggccagaggcatggagtacttggcttcccaaaaatgtattcatcgagatttagcagccagaaatgttttggtaacagaaaacaatgtgatgaaaatagcagactttggactcgccagagatatcaacaatatagactattacaaaaagaccaccaatgggcggcttccagtcaagtggatggctccagaagccctgtttgatagagtatacactcatcagagtgatgtctggtccttcggggtgttaatgtgggagatcttcactttagggggctcgccctacccagggattcccgtggaggaactttttaagctgctgaaggaaggacacagaatggataagccagccaactgcaccaacgaactgtacatgatgatgagggactgttggcatgcagtgccctcccagagaccaacgttcaagcagttggtagaagacttggatcgaattctcactctcacaaccaatgaggaatacttggacctcagccaacctctcgaacagtattcacctagttaccctgacacaagaagttcttgttcttcaggagatgattctgttttttctccagaccccatgccttacgaaccatgccttcctcagtatccacacataaacggcagtgttaaaaca

SEQ ID NO: 9576 - protein, 822 aa, Homo sapiens
MVSWGRFICLVVVTMATLSLARPSFSLVEDTTLEPEEPPTKYQISQPEVYVAAPGESLEVRCLLKDAAVISWTKDGVHLGPNNRTVLIGEYLQIKGATPRDSGLYACTASRTVDSETWYFMVNVTDAISSGDDEDDTDGAEDFVSENSNNKRAPYWTNTEKMEKRLHAVPAANTVKFRCPAGGNPMPTMRWLKNGKEFKQEHRIGGYKVRNQHWSLIMESVVPSDKGNYTCVVENEYGSINHTYHLDVVERSPHRPILQAGLPANASTVVGGDVEFVCKVYSDAQPHIQWIKHVEKNGSKYGPDGLPYLKVLKHSGINSSNAEVLALFNVTEADAGEYICKVSNYIGQANQSAWLTVLPKQQAPGREKEITASPDYLEIAIYCIGVFLIACMVVTVILCRMKNTTKKPDFSSQPAVHKLTKRIPLRRQVTVSAESSSSMNSNTPLVRITTRLSSTADTPMLAGVSEYELPEDPKWEFPRDKLTLGKPLGEGCFGQVVMAEAVGIDKDKPKEAVTVAVKMLKDDATEKDLSDLVSEMEMMKMIGKHKNIINLLGACTQDGPLYVIVEYASKGNLREYLRARRPPGMEYSYDINRVPEEQMTFKDLVSCTYQLARGMEYLASQKCIHRDLAARNVLVTENNVMKIADFGLARDINNIDYYKKTTNGRLPVKWMAPEALFDRVYTHQSDVWSFGVLMWEIFTLGGSPYPGIPVEELFKLLKEGHRMDKPANCTNELYMMMRDCWHAVPSQRPTFKQLVEDLDRILTLTTNEEYLDLSQPLEQYSPSYPDTRSSCSSGDDSVFSPDPMPYEPCLPQYPHINGSVKT

SEQ ID NO: 9577 - DNA, 2418 bp, Homo sapiens
  CDS (1)..(2418)
atgggcgcccctgcctgcgccctcgcgctctgcgtggccgtggccatcgtggccggcgcctcctcggagtccttggggacggagcagcgcgtcgtggggcgagcggcagaagtcccgggcccagagcccggccagcaggagcagttggtcttcggcagcggggatgctgtggagctgagctgtcccccgcccgggggtggtcccatggggcccactgtctgggtcaaggatggcacagggctggtgccctcggagcgtgtcctggtggggccccagcggctgcaggtgctgaatgcctcccacgaggactccggggcctacagctgccggcagcggctcacgcagcgcgtactgtgccacttcagtgtgcgggtgacagacgctccatcctcgggagatgacgaagacggggaggacgaggctgaggacacaggtgtggacacaggggccccttactggacacggcccgagcggatggacaagaagctgctggccgtgccggccgccaacaccgtccgcttccgctgcccagccgctggcaaccccactccctccatctcctggctgaagaacggcagggagttccgcggcgagcaccgcattggaggcatcaagctgcggcatcagcagtggagcctggtcatggaaagcgtggtgccctcggaccgcggcaactacacctgcgtcgtggagaacaagtttggcagcatccggcagacgtacacgctggacgtgctggagcgctccccgcaccggcccatcctgcaggcggggctgccggccaaccagacggcggtgctgggcagcgacgtggagttccactgcaaggtgtacagtgacgcacagccccacatccagtggctcaagcacgtggaggtgaatggcagcaaggtgggcccggacggcacaccctacgttaccgtgctcaagacggcgggcgctaacaccaccgacaaggagctagaggttctctccttgcacaacgtcacctttgaggacgccggggagtacacctgcctggcgggcaattctattgggttttctcatcactctgcgtggctggtggtgctgccagccgaggaggagctggtggaggctgacgaggcgggcagtgtgtatgcaggcatcctcagctacggggtgggcttcttcctgttcatcctggtggtggcggctgtgacgctctgccgcctgcgcagcccccccaagaaaggcctgggctcccccaccgtgcacaagatctcccgcttcccgctcaagcgacaggtgtccctggagtccaacgcgtccatgagctccaacacaccactggtgcgcatcgcaaggctgtcctcaggggagggccccacgctggccaatgtctccgagctcgagctgcctgccgaccccaaatgggagctgtctcgggcccggctgaccctgggcaagccccttggggagggctgcttcggccaggtggtcatggcggaggccatcggcattgacaaggaccgggccgccaagcctgtcaccgtagccgtgaagatgctgaaagacgatgccactgacaaggacctgtcggacctggtgtctgagatggagatgatgaagatgatcgggaaacacaaaaacatcatcaacctgctgggcgcctgcacgcagggcgggcccctgtacgtgctggtggagtacgcggccaagggtaacctgcgggagtttctgcgggcgcggcggcccccgggcctggactactccttcgacacctgcaagccgcccgaggagcagctcaccttcaaggacctggtgtcctgtgcctaccaggtggcccggggcatggagtacttggcctcccagaagtgcatccacagggacctggctgcccgcaatgtgctggtgaccgaggacaacgtgatgaagatcgcagacttcgggctggcccgggacgtgcacaacctcgactactacaagaagacgaccaacggccggctgcccgtgaagtggatggcgcctgaggccttgtttgaccgagtctacactcaccagagtgacgtctggtcctttggggtcctgctctgggagatcttcacgctggggggctccccgtaccccggcatccctgtggaggagctcttcaagctgctgaaggagggccaccgcatggacaagcccgccaactgcacacacgacctgtacatgatcatgcgggagtgctggcatgccgcgccctcccagaggcccaccttcaagcagctggtggaggacctggaccgtgtccttaccgtgacgtccaccgacgagtacctggacctgtcggcgcctttcgagcagtactccccgggtggccaggacacccccagctccagctcctcaggggacgactccgtgtttgcccacgacctgctgcccccggccccacccagcagtgggggctcgcggacg

SEQ ID NO: 9578 - protein, 806 aa, Homo sapiens
MGAPACALALCVAVAIVAGASSESLGTEQRVVGRAAEVPGPEPGQQEQLVFGSGDAVELSCPPPGGGPMGPTVWVKDGTGLVPSERVLVGPQRLQVLNASHEDSGAYSCRQRLTQRVLCHFSVRVTDAPSSGDDEDGEDEAEDTGVDTGAPYWTRPERMDKKLLAVPAANTVRFRCPAAGNPTPSISWLKNGREFRGEHRIGGIKLRHQQWSLVMESVVPSDRGNYTCVVENKFGSIRQTYTLDVLERSPHRPILQAGLPANQTAVLGSDVEFHCKVYSDAQPHIQWLKHVEVNGSKVGPDGTPYVTVLKTAGANTTDKELEVLSLHNVTFEDAGEYTCLAGNSIGFSHHSAWLVVLPAEEELVEADEAGSVYAGILSYGVGFFLFILVVAAVTLCRLRSPPKKGLGSPTVHKISRFPLKRQVSLESNASMSSNTPLVRIARLSSGEGPTLANVSELELPADPKWELSRARLTLGKPLGEGCFGQVVMAEAIGIDKDRAAKPVTVAVKMLKDDATDKDLSDLVSEMEMMKMIGKHKNIINLLGACTQGGPLYVLVEYAAKGNLREFLRARRPPGLDYSFDTCKPPEEQLTFKDLVSCAYQVARGMEYLASQKCIHRDLAARNVLVTEDNVMKIADFGLARDVHNLDYYKKTTNGRLPVKWMAPEALFDRVYTHQSDVWSFGVLLWEIFTLGGSPYPGIPVEELFKLLKEGHRMDKPANCTHDLYMIMRECWHAAPSQRPTFKQLVEDLDRVLTVTSTDEYLDLSAPFEQYSPGGQDTPSSSSSGDDSVFAHDLLPPAPPSSGGSRT

SEQ ID NO: 9579 - DNA, 2979 bp, Homo sapiens
  CDS (1)..(2979)
atgccggcgttggcgcgcgacggcggccagctgccgctgctcgttgttttttctgcaatgatatttgggactattacaaatcaagatctgcctgtgatcaagtgtgttttaatcaatcataagaacaatgattcatcagtggggaagtcatcatcatatcccatggtatcagaatccccggaagacctcgggtgtgcgttgagaccccagagctcagggacagtgtacgaagctgccgctgtggaagtggatgtatctgcttccatcacactgcaagtgctggtcgacgccccagggaacatttcctgtctctgggtctttaagcacagctccctgaattgccagccacattttgatttacaaaacagaggagttgtttccatggtcattttgaaaatgacagaaacccaagctggagaatacctactttttattcagagtgaagctaccaattacacaatattgtttacagtgagtataagaaataccctgctttacacattaagaagaccttactttagaaaaatggaaaaccaggacgccctggtctgcatatctgagagcgttccagagccgatcgtggaatgggtgctttgcgattcacagggggaaagctgtaaagaagaaagtccagctgttgttaaaaaggaggaaaaagtgcttcatgaattatttgggacggacataaggtgctgtgccagaaatgaactgggcagggaatgcaccaggctgttcacaatagatctaaatcaaactcctcagaccacattgccacaattatttcttaaagtaggggaacccttatggataaggtgcaaagctgttcatgtgaaccatggattcgggctcacctgggaattagaaaacaaagcactcgaggagggcaactactttgagatgagtacctattcaacaaacagaactatgatacggattctgtttgcttttgtatcatcagtggcaagaaacgacaccggatactacacttgttcctcttcaaagcatcccagtcaatcagctttggttaccatcgtagaaaagggatttataaatgctaccaattcaagtgaagattatgaaattgaccaatatgaagagttttgtttttctgtcaggtttaaagcctacccacaaatcagatgtacgtggaccttctctcgaaaatcatttccttgtgagcaaaagggtcttgataacggatacagcatatccaagttttgcaatcataagcaccagccaggagaatatatattccatgcagaaaatgatgatgcccaatttaccaaaatgttcacgctgaatataagaaggaaacctcaagtgctcgcagaagcatcggcaagtcaggcgtcctgtttctcggatggatacccattaccatcttggacctggaagaagtgttcagacaagtctcccaactgcacagaagagatcacagaaggagtctggaatagaaaggctaacagaaaagtgtttggacagtgggtgtcgagcagtactctaaacatgagtgaagccataaaagggttcctggtcaagtgctgtgcatacaattcccttggcacatcttgtgagacgatccttttaaactctccaggccccttccctttcatccaagacaacatctcattctatgcaacaattggtgtttgtctcctcttcattgtcgttttaaccctgctaatttgtcacaagtacaaaaagcaatttaggtatgaaagccagctacagatggtacaggtgaccggctcctcagataatgagtacttctacgttgatttcagagaatatgaatatgatctcaaatgggagtttccaagagaaaatttagagtttgggaaggtactaggatcaggtgcttttggaaaagtgatgaacgcaacagcttatggaattagcaaaacaggagtctcaatccaggttgccgtcaaaatgctgaaagaaaaagcagacagctctgaaagagaggcactcatgtcagaactcaagatgatgacccagctgggaagccacgagaatattgtgaacctgctgggggcgtgcacactgtcaggaccaatttacttgatttttgaatactgttgctatggtgatcttctcaactatctaagaagtaaaagagaaaaatttcacaggacttggacagagattttcaaggaacacaatttcagtttttaccccactttccaatcacatccaaattccagcatgcctggttcaagagaagttcagatacacccggactcggatcaaatctcagggcttcatgggaattcatttcactctgaagatgaaattgaatatgaaaaccaaaaaaggctggaagaagaggaggacttgaatgtgcttacatttgaagatcttctttgctttgcatatcaagttgccaaaggaatggaatttctggaatttaagtcgtgtgttcacagagacctggccgccaggaacgtgcttgtcacccacgggaaagtggtgaagatatgtgactttggattggctcgagatatcatgagtgattccaactatgttgtcaggggcaatgcccgtctgcctgtaaaatggatggcccccgaaagcctgtttgaaggcatctacaccattaagagtgatgtctggtcatatggaatattactgtgggaaatcttctcacttggtgtgaatccttaccctggcattccggttgatgctaacttctacaaactgattcaaaatggatttaaaatggatcagccattttatgctacagaagaaatatacattataatgcaatcctgctgggcttttgactcaaggaaacggccatccttccctaatttgacttcgtttttaggatgtcagctggcagatgcagaagaagcgatgtatcagaatgtggatggccgtgtttcggaatgtcctcacacctaccaaaacaggcgacctttcagcagagagatggatttggggctactctctccgcaggctcaggtcgaagattcg

SEQ ID NO: 9580 - protein, 993 aa, Homo sapiens
MPALARDGGQLPLLVVFSAMIFGTITNQDLPVIKCVLINHKNNDSSVGKSSSYPMVSESPEDLGCALRPQSSGTVYEAAAVEVDVSASITLQVLVDAPGNISCLWVFKHSSLNCQPHFDLQNRGVVSMVILKMTETQAGEYLLFIQSEATNYTILFTVSIRNTLLYTLRRPYFRKMENQDALVCISESVPEPIVEWVLCDSQGESCKEESPAVVKKEEKVLHELFGTDIRCCARNELGRECTRLFTIDLNQTPQTTLPQLFLKVGEPLWIRCKAVHVNHGFGLTWELENKALEEGNYFEMSTYSTNRTMIRILFAFVSSVARNDTGYYTCSSSKHPSQSALVTIVEKGFINATNSSEDYEIDQYEEFCFSVRFKAYPQIRCTWTFSRKSFPCEQKGLDNGYSISKFCNHKHQPGEYIFHAENDDAQFTKMFTLNIRRKPQVLAEASASQASCFSDGYPLPSWTWKKCSDKSPNCTEEITEGVWNRKANRKVFGQWVSSSTLNMSEAIKGFLVKCCAYNSLGTSCETILLNSPGPFPFIQDNISFYATIGVCLLFIVVLTLLICHKYKKQFRYESQLQMVQVTGSSDNEYFYVDFREYEYDLKWEFPRENLEFGKVLGSGAFGKVMNATAYGISKTGVSIQVAVKMLKEKADSSEREALMSELKMMTQLGSHENIVNLLGACTLSGPIYLIFEYCCYGDLLNYLRSKREKFHRTWTEIFKEHNFSFYPTFQSHPNSSMPGSREVQIHPDSDQISGLHGNSFHSEDEIEYENQKRLEEEEDLNVLTFEDLLCFAYQVAKGMEFLEFKSCVHRDLAARNVLVTHGKVVKICDFGLARDIMSDSNYVVRGNARLPVKWMAPESLFEGIYTIKSDVWSYGILLWEIFSLGVNPYPGIPVDANFYKLIQNGFKMDQPFYATEEIYIIMQSCWAFDSRKRPSFPNLTSFLGCQLADAEEAMYQNVDGRVSECPHTYQNRRPFSREMDLGLLSPQAQVEDS

SEQ ID NO: 9581 - DNA, 720 bp, Homo sapiens
  CDS (1)..(720)
atggtgagcaagggcgaggagctgttcaccggggtggtgcccatcctggtcgagctggacggcgacgtaaacggccacaagttcagcgtgtccggcgagggcgagggcgatgccacctacggcaagctgaccctgaagttcatctgcaccaccggcaagctgcccgtgccctggcccaccctcgtgaccaccctgacctacggcgtgcagtgcttcagccgctaccccgaccacatgaagcagcacgacttcttcaagtccgccatgcccgaaggctacgtccaggagcgcaccatcttcttcaaggacgacggcaactacaagacccgcgccgaggtgaagttcgagggcgacaccctggtgaaccgcatcgagctgaagggcatcgacttcaaggaggacggcaacatcctggggcacaagctggagtacaactacaacagccacaacgtctatatcatggccgacaagcagaagaacggcatcaaggtgaacttcaagatccgccacaacatcgaggacggcagcgtgcagctcgccgaccactaccagcagaacacccccatcggcgacggccccgtgctgctgcccgacaaccactacctgagcacccagtccgccctgagcaaagaccccaacgagaagcgcgatcacatggtcctgctggagttcgtgaccgccgccgggatcactctcggcatggacgagctgtacaagtaa

SEQ ID NO: 9582 - protein, 239 aa, Homo sapiens
MVSKGEELFTGVVPILVELDGDVNGHKFSVSGEGEGDATYGKLTLKFICTTGKLPVPWPTLVTTLTYGVQCFSRYPDHMKQHDFFKSAMPEGYVQERTIFFKDDGNYKTRAEVKFEGDTLVNRIELKGIDFKEDGNILGHKLEYNYNSHNVYIMADKQKNGIKVNFKIRHNIEDGSVQLADHYQQNTPIGDGPVLLPDNHYLSTQSALSKDPNEKRDHMVLLEFVTAAGITLGMDELYK

SEQ ID NO: 9583 - DNA, 1077 bp, Homo sapiens
  CDS (1)..(1077)
atgactctggagtccatgatggcgtgttgcctgagcgatgaggtgaaggagtccaagcggatcaacgccgagatcgagaagcagctgcggcgggacaagcgcgacgcccggcgcgagctcaagctgctgctgctcggcacgggcgagagcgggaagagcacgttcatcaagcagatgcgcatcatccacggcgccggctactcggaggaggacaagcgcggcttcaccaagctcgtctaccagaacatcttcaccgccatgcaggccatgatccgggccatggagacgctcaagatcctctacaagtacgagcagaacaaggccaatgcgctcctgatccgggaggtggacgtggagaaggtgaccaccttcgagcatcagtacgtcagtgccatcaagaccctgtgggaggacccgggcatccaggaatgctacgaccgcaggcgcgagtaccagctctccgactctgccaagtactacctgaccgacgttgaccgcatcgccaccttgggctacctgcccacccagcaggacgtgctgcgggtccgcgtgcccaccaccggcatcatcgagtaccctttcgacctggagaacatcatcttccggatggtggatgtggggggccagcggtcggagcggaggaagtggatccactgctttgagaacgtgacatccatcatgtttctcgtcgccctcagcgaatacgaccaagtcctggtggagtcggacaacgagaaccggatggaggagagcaaagccctgttccggaccatcatcacctacccctggttccagaactcctccgtcatcctcttcctcaacaagaaggacctgctggaggacaagatcctgtactcgcacctggtggactacttccccgagttcgatggtccccagcgggacgcccaggcggcgcgggagttcatcctgaagatgttcgtggacctgaaccccgacagcgacaagatcatctactcacacttcacgtgtgccaccgacacggagaacatccgcttcgtgttcgcggccgtgaaggacaccatcctgcagctcaacctcaaggagtacaacctggtc

SEQ ID NO: 9584 - protein, 359 aa, Homo sapiens
MTLESMMACCLSDEVKESKRINAEIEKQLRRDKRDARRELKLLLLGTGESGKSTFIKQMRIIHGAGYSEEDKRGFTKLVYQNIFTAMQAMIRAMETLKILYKYEQNKANALLIREVDVEKVTTFEHQYVSAIKTLWEDPGIQECYDRRREYQLSDSAKYYLTDVDRIATLGYLPTQQDVLRVRVPTTGIIEYPFDLENIIFRMVDVGGQRSERRKWIHCFENVTSIMFLVALSEYDQVLVESDNENRMEESKALFRTIITYPWFQNSSVILFLNKKDLLEDKILYSHLVDYFPEFDGPQRDAQAAREFILKMFVDLNPDSDKIIYSHFTCATDTENIRFVFAAVKDTILQLNLKEYNLV

SEQ ID NO: 9585 - DNA, 1077 bp, Homo sapiens
  CDS (1)..(1077)
atgactctggagtccatcatggcgtgctgcctgagcgaggaggccaaggaagcccggcggatcaacgacgagatcgagcggcagctccgcagggacaagcgggacgcccgccgggagctcaagctgctgctgctcgggacaggagagagtggcaagagtacgtttatcaagcagatgagaatcatccatgggtcaggatactctgatgaagataaaaggggcttcaccaagctggtgtatcagaacatcttcacggccatgcaggccatgatcagagccatggacacactcaagatcccatacaagtatgagcacaataaggctcatgcacaattagttcgagaagttgatgtggagaaggtgtctgcttttgagaatccatatgtagatgcaataaagagtttatggaatgatcctggaatccaggaatgctatgatagacgacgagaatatcaattatctgactctaccaaatactatcttaatgacttggaccgcgtagctgaccctgcctacctgcctacgcaacaagatgtgcttagagttcgagtccccaccacagggatcatcgaatacccctttgacttacaaagtgtcattttcagaatggtcgatgtagggggccaaaggtcagagagaagaaaatggatacactgctttgaaaatgtcacctctatcatgtttctagtagcgcttagtgaatatgatcaagttctcgtggagtcagacaatgagaaccgaatggaggaaagcaaggctctctttagaacaattatcacatacccctggttccagaactcctcggttattctgttcttaaacaagaaagatcttctagaggagaaaatcatgtattcccatctagtcgactacttcccagaatatgatggaccccagagagatgcccaggcagcccgagaattcattctgaagatgttcgtggacctgaacccagacagtgacaaaattatctactcccacttcacgtgcgccacagacaccgagaatatccgctttgtctttgctgccgtcaaggacaccatcctccagttgaacctgaaggagtacaatctggtc

SEQ ID NO: 9586 - protein, 359 aa, Homo sapiens
MTLESIMACCLSEEAKEARRINDEIERQLRRDKRDARRELKLLLLGTGESGKSTFIKQMRIIHGSGYSDEDKRGFTKLVYQNIFTAMQAMIRAMDTLKIPYKYEHNKAHAQLVREVDVEKVSAFENPYVDAIKSLWNDPGIQECYDRRREYQLSDSTKYYLNDLDRVADPAYLPTQQDVLRVRVPTTGIIEYPFDLQSVIFRMVDVGGQRSERRKWIHCFENVTSIMFLVALSEYDQVLVESDNENRMEESKALFRTIITYPWFQNSSVILFLNKKDLLEEKIMYSHLVDYFPEYDGPQRDAQAAREFILKMFVDLNPDSDKIIYSHFTCATDTENIRFVFAAVKDTILQLNLKEYNLV

SEQ ID NO: 9587 - DNA, 657 bp, Homo sapiens
  CDS (1)..(657)
atggcgacccgcagccctggcgtcgtgattagtgatgatgaaccaggttatgaccttgatttattttgcatacctaatcattatgctgaggatttggaaagggtgtttattcctcatggactaattatggacaggactgaacgtcttgctcgagatgtgatgaaggagatgggaggccatcacattgtagccctctgtgtgctcaaggggggctataaattctttgctgacctgctggattacatcaaagcactgaatagaaatagtgatagatccattcctatgactgtagattttatcagactgaagagctattgtaatgaccagtcaacaggggacataaaagtaattggtggagatgatctctcaactttaactggaaagaatgtcttgattgtggaagatataattgacactggcaaaacaatgcagactttgctttccttggtcaggcagtataatccaaagatggtcaaggtcgcaagcttgctggtgaaaaggaccccacgaagtgttggatataagccagactttgttggatttgaaattccagacaagtttgttgtaggatatgcccttgactataatgaatacttcagggatttgaatcatgtttgtgtcattagtgaaactggaaaagcaaaatacaaagcctaa

SEQ ID NO: 9588 - protein, 218 aa, Homo sapiens
MATRSPGVVISDDEPGYDLDLFCIPNHYAEDLERVFIPHGLIMDRTERLARDVMKEMGGHHIVALCVLKGGYKFFADLLDYIKALNRNSDRSIPMTVDFIRLKSYCNDQSTGDIKVIGGDDLSTLTGKNVLIVEDIIDTGKTMQTLLSLVRQYNPKMVKVASLLVKRTPRSVGYKPDFVGFEIPDKFVVGYALDYNEYFRDLNHVCVISETGKAKYKA

SEQ ID NO: 9589 - DNA, 570 bp, Homo sapiens
  CDS (1)..(570)
atgacggaatataagctggtggtggtgggcgccggcggtgtgggcaagagtgcgctgaccatccagctgatccagaaccattttgtggacgaatacgaccccactatagaggattcctaccggaagcaggtggtcattgatggggagacgtgcctgttggacatcctggataccgccggccaggaggagtacagcgccatgcgggaccagtacatgcgcaccggggagggcttcctgtgtgtgtttgccatcaacaacaccaagtcttttgaggacatccaccagtacagggagcagatcaaacgggtgaaggactcggatgacgtgcccatggtgctggtggggaacaagtgtgacctggctgcacgcactgtggaatctcggcaggctcaggacctcgcccgaagctacggcatcccctacatcgagacctcggccaagacccggcagggagtggaggatgccttctacacgttggtgcgtgagatccggcagcacaagctgcggaagctgaaccctcctgatgagagtggccccggctgcatgagctgcaagtgtgtgctctcctga

SEQ ID NO: 9590 - protein, 189 aa, Homo sapiens
MTEYKLVVVGAGGVGKSALTIQLIQNHFVDEYDPTIEDSYRKQVVIDGETCLLDILDTAGQEEYSAMRDQYMRTGEGFLCVFAINNTKSFEDIHQYREQIKRVKDSDDVPMVLVGNKCDLAARTVESRQAQDLARSYGIPYIETSAKTRQGVEDAFYTLVREIRQHKLRKLNPPDESGPGCMSCKCVLS

SEQ ID NO: 9591 - DNA, 1242 bp, Homo sapiens
  CDS (1)..(1242)
atgtccaaaaaaatcagtggcggttctgtggtagagatgcaaggagatgaaatgacacgaatcatttgggaattgattaaagagaaactcatttttccctacgtggaattggatctacatagctatgatttaggcatagagaatcgtgatgccaccaacgaccaagtcaccaaggatgctgcagaagctataaagaagcataatgttggcgtcaaatgtgccactatcactcctgatgagaagagggttgaggagttcaagttgaaacaaatgtggaaatcaccaaatggcaccatacgaaatattctgggtggcacggtcttcagagaagccattatctgcaaaaatatcccccggcttgtgagtggatgggtaaaacctatcatcataggtcgtcatgcttatggggatcaatacagagcaactgattttgttgttcctgggcctggaaaagtagagataacctacacaccaagtgacggaacccaaaaggtgacatacctggtacataactttgaagaaggtggtggtgttgccatggggatgtataatcaagataagtcaattgaagattttgcacacagttccttccaaatggctctgtctaagggttggcctttgtatctgagcaccaaaaacactattctgaagaaatatgatgggcgttttaaagacatctttcaggagatatatgacaagcagtacaagtcccagtttgaagctcaaaagatctggtatgagcataggctcatcgacgacatggtggcccaagctatgaaatcagagggaggcttcatctgggcctgtaaaaactatgatggtgacgtgcagtcggactctgtggcccaagggtatggctctctcggcatgatgaccagcgtgctggtttgtccagatggcaagacagtagaagcagaggctgcccacgggactgtaacccgtcactaccgcatgtaccagaaaggacaggagacgtccaccaatcccattgcttccatttttgcctggaccagagggttagcccacagagcaaagcttgataacaataaagagcttgccttctttgcaaatgctttggaagaagtctctattgagacaattgaggctggcttcatgaccaaggacttggctgcttgcattaaaggtttacccaatgtgcaacgttctgactacttgaatacatttgagttcatggataaacttggagaaaacttgaagatcaaactagctcaggccaaactt

SEQ ID NO: 9592 - protein, 414 aa, Homo sapiens
MSKKISGGSVVEMQGDEMTRIIWELIKEKLIFPYVELDLHSYDLGIENRDATNDQVTKDAAEAIKKHNVGVKCATITPDEKRVEEFKLKQMWKSPNGTIRNILGGTVFREAIICKNIPRLVSGWVKPIIIGRHAYGDQYRATDFVVPGPGKVEITYTPSDGTQKVTYLVHNFEEGGGVAMGMYNQDKSIEDFAHSSFQMALSKGWPLYLSTKNTILKKYDGRFKDIFQEIYDKQYKSQFEAQKIWYEHRLIDDMVAQAMKSEGGFIWACKNYDGDVQSDSVAQGYGSLGMMTSVLVCPDGKTVEAEAAHGTVTRHYRMYQKGQETSTNPIASIFAWTRGLAHRAKLDNNKELAFFANALEEVSIETIEAGFMTKDLAACIKGLPNVQRSDYLNTFEFMDKLGENLKIKLAQAKL

SEQ ID NO: 9593 - DNA, 1356 bp, Homo sapiens
  CDS (1)..(1356)
atggccggctacctgcgggtcgtgcgctcgctctgcagagcctcaggctcgcggccggcctgggcgccggcggccctgacagcccccacctcgcaagagcagccgcggcgccactatgccgacaaaaggatcaaggtggcgaagcccgtggtggagatggatggtgatgagatgacccgtattatctggcagttcatcaaggagaagctcatcctgccccacgtggacatccagctaaagtattttgacctcgggctcccaaaccgtgaccagactgatgaccaggtcaccattgactctgcactggccacccagaagtacagtgtggctgtcaagtgtgccaccatcacccctgatgaggcccgtgtggaagagttcaagctgaagaagatgtggaaaagtcccaatggaactatccggaacatcctgggggggactgtcttccgggagcccatcatctgcaaaaacatcccacgcctagtccctggctggaccaagcccatcaccattggcaggcacgcccatggcgaccagtacaaggccacagactttgtggcagaccgggccggcactttcaaaatggtcttcaccccaaaagatggcagtggtgtcaaggagtgggaagtgtacaacttccccgcaggcggcgtgggcatgggcatgtacaacaccgacgagtccatctcaggttttgcgcacagctgcttccagtatgccatccagaagaaatggccgctgtacatgagcaccaagaacaccatactgaaagcctacgatgggcgtttcaaggacatcttccaggagatctttgacaagcactataagaccgacttcgacaagaataagatctggtatgagcaccggctcattgatgacatggtggctcaggtcctcaagtcttcgggtggctttgtgtgggcctgcaagaactatgacggagatgtgcagtcagacatcctggcccagggctttggctcccttggcctgatgacgtccgtcctggtctgccctgatgggaagacgattgaggctgaggccgctcatgggaccgtcacccgccactatcgggagcaccagaagggccggcccaccagcaccaaccccatcgccagcatctttgcctggacacgtggcctggagcaccgggggaagctggatgggaaccaagacctcatcaggtttgcccagatgctggagaaggtgtgcgtggagacggtggagagtggagccatgaccaaggacctggcgggctgcattcacggcctcagcaatgtgaagctgaacgagcacttcctgaacaccacggacttcctcgacaccatcaagagcaacctggacagagccctgggcaggcag

SEQ ID NO: 9594 - protein, 452 aa, Homo sapiens
MAGYLRVVRSLCRASGSRPAWAPAALTAPTSQEQPRRHYADKRIKVAKPVVEMDGDEMTRIIWQFIKEKLILPHVDIQLKYFDLGLPNRDQTDDQVTIDSALATQKYSVAVKCATITPDEARVEEFKLKKMWKSPNGTIRNILGGTVFREPIICKNIPRLVPGWTKPITIGRHAHGDQYKATDFVADRAGTFKMVFTPKDGSGVKEWEVYNFPAGGVGMGMYNTDESISGFAHSCFQYAIQKKWPLYMSTKNTILKAYDGRFKDIFQEIFDKHYKTDFDKNKIWYEHRLIDDMVAQVLKSSGGFVWACKNYDGDVQSDILAQGFGSLGLMTSVLVCPDGKTIEAEAAHGTVTRHYREHQKGRPTSTNPIASIFAWTRGLEHRGKLDGNQDLIRFAQMLEKVCVETVESGAMTKDLAGCIHGLSNVKLNEHFLNTTDFLDTIKSNLDRALGRQ

SEQ ID NO: 9595 - DNA, 1872 bp, Homo sapiens
  CDS (1)..(1872)
atgcagccagatcccaggcctagcggggctggggcctgctgccgattcctgcccctgcagtcacagtgccctgagggggcaggggacgcggtgatgtacgcctccactgagtgcaaggcggaggtgacgccctcccagcatggcaaccgcaccttcagctacaccctggaggatcataccaagcaggcctttggcatcatgaacgagctgcggctcagccagcagctgtgtgacgtcacactgcaggtcaagtaccaggatgcaccggccgcccagttcatggcccacaaggtggtgctggcctcatccagccctgtcttcaaggccatgttcaccaacgggctgcgggagcagggcatggaggtggtgtccattgagggtatccaccccaaggtcatggagcgcctcattgaattcgcctacacggcctccatctccatgggcgagaagtgtgtcctccacgtcatgaacggtgctgtcatgtaccagatcgacagcgttgtccgtgcctgcagtgacttcctggtgcagcagctggaccccagcaatgccatcggcatcgccaacttcgctgagcagattggctgtgtggagttgcaccagcgtgcccgggagtacatctacatgcattttggggaggtggccaagcaagaggagttcttcaacctgtcccactgccaactggtgaccctcatcagccgggacgacctgaacgtgcgctgcgagtccgaggtcttccacgcctgcatcaactgggtcaagtacgactgcgaacagcgacggttctacgtccaggcgctgctgcgggccgtgcgctgccactcgttgacgccgaacttcctgcagatgcagctgcagaagtgcgagatcctgcagtccgactcccgctgcaaggactacctggtcaagatcttcgaggagctcaccctgcacaagcccacgcaggtgatgccctgccgggcgcccaaggtgggccgcctgatctacaccgcgggcggctacttccgacagtcgctcagctacctggaggcttacaaccccagtgacggcacctggctccggttggcggacctgcaggtgccgcggagcggcctggccggctgcgtggtgggcgggctgttgtacgccgtgggcggcaggaacaactcgcccgacggcaacaccgactccagcgccctggactgttacaaccccatgaccaatcagtggtcgccctgcgcccccatgagcgtgccccgtaaccgcatcggggtgggggtcatcgatggccacatctatgccgtcggcggctcccacggctgcatccaccacaacagtgtggagaggtatgagccagagcgggatgagtggcacttggtggccccaatgctgacacgaaggatcggggtgggcgtggctgtcctcaatcgtctcctttatgccgtggggggctttgacgggacaaaccgccttaattcagctgagtgttactacccagagaggaacgagtggcgaatgatcacagcaatgaacaccatccgaagcggggcaggcgtctgcgtcctgcacaactgtatctatgctgctgggggctatgatggtcaggaccagctgaacagcgtggagcgctacgatgtggaaacagagacgtggactttcgtagcccccatgaagcaccggcgaagtgccctggggatcactgtccaccaggggagaatctacgtccttggaggctatgatggtcacacgttcctggacagtgtggagtgttacgacccagatacagacacctggagcgaggtgacccgaatgacatcgggccggagtggggtgggcgtggctgtcaccatggagccctgccggaagcagattgaccagcagaactgtacctgt

SEQ ID NO: 9596 - protein, 624 aa, Homo sapiens
MQPDPRPSGAGACCRFLPLQSQCPEGAGDAVMYASTECKAEVTPSQHGNRTFSYTLEDHTKQAFGIMNELRLSQQLCDVTLQVKYQDAPAAQFMAHKVVLASSSPVFKAMFTNGLREQGMEVVSIEGIHPKVMERLIEFAYTASISMGEKCVLHVMNGAVMYQIDSVVRACSDFLVQQLDPSNAIGIANFAEQIGCVELHQRAREYIYMHFGEVAKQEEFFNLSHCQLVTLISRDDLNVRCESEVFHACINWVKYDCEQRRFYVQALLRAVRCHSLTPNFLQMQLQKCEILQSDSRCKDYLVKIFEELTLHKPTQVMPCRAPKVGRLIYTAGGYFRQSLSYLEAYNPSDGTWLRLADLQVPRSGLAGCVVGGLLYAVGGRNNSPDGNTDSSALDCYNPMTNQWSPCAPMSVPRNRIGVGVIDGHIYAVGGSHGCIHHNSVERYEPERDEWHLVAPMLTRRIGVGVAVLNRLLYAVGGFDGTNRLNSAECYYPERNEWRMITAMNTIRSGAGVCVLHNCIYAAGGYDGQDQLNSVERYDVETETWTFVAPMKHRRSALGITVHQGRIYVLGGYDGHTFLDSVECYDPDTDTWSEVTRMTSGRSGVGVAVTMEPCRKQIDQQNCTC

SEQ ID NO: 9597 - DNA, 2928 bp, Homo sapiens
  CDS (1)..(2928)
atgagaggcgctcgcggcgcctgggattttctctgcgttctgctcctactgcttcgcgtccagacaggctcttctcaaccatctgtgagtccaggggaaccgtctccaccatccatccatccaggaaaatcagacttaatagtccgcgtgggcgacgagattaggctgttatgcactgatccgggctttgtcaaatggacttttgagatcctggatgaaacgaatgagaataagcagaatgaatggatcacggaaaaggcagaagccaccaacaccggcaaatacacgtgcaccaacaaacacggcttaagcaattccatttatgtgtttgttagagatcctgccaagcttttccttgttgaccgctccttgtatgggaaagaagacaacgacacgctggtccgctgtcctctcacagacccagaagtgaccaattattccctcaaggggtgccaggggaagcctcttcccaaggacttgaggtttattcctgaccccaaggcgggcatcatgatcaaaagtgtgaaacgcgcctaccatcggctctgtctgcattgttctgtggaccaggagggcaagtcagtgctgtcggaaaaattcatcctgaaagtgaggccagccttcaaagctgtgcctgttgtgtctgtgtccaaagcaagctatcttcttagggaaggggaagaattcacagtgacgtgcacaataaaagatgtgtctagttctgtgtactcaacgtggaaaagagaaaacagtcagactaaactacaggagaaatataatagctggcatcacggtgacttcaattatgaacgtcaggcaacgttgactatcagttcagcgagagttaatgattctggagtgttcatgtgttatgccaataatacttttggatcagcaaatgtcacaacaaccttggaagtagtagataaaggattcattaatatcttccccatgataaacactacagtatttgtaaacgatggagaaaatgtagatttgattgttgaatatgaagcattccccaaacctgaacaccagcagtggatctatatgaacagaaccttcactgataaatgggaagattatcccaagtctgagaatgaaagtaatatcagatacgtaagtgaacttcatctaacgagattaaaaggcaccgaaggaggcacttacacattcctagtgtccaattctgacgtcaatgctgccatagcatttaatgtttatgtgaatacaaaaccagaaatcctgacttacgacaggctcgtgaatggcatgctccaatgtgtggcagcaggattcccagagcccacaatagattggtatttttgtccaggaactgagcagagatgctctgcttctgtactgccagtggatgtgcagacactaaactcatctgggccaccgtttggaaagctagtggttcagagttctatagattctagtgcattcaagcacaatggcacggttgaatgtaaggcttacaacgatgtgggcaagacttctgcctattttaactttgcatttaaaggtaacaacaaagagcaaatccatccccacaccctgttcactcctttgctgattggtttcgtaatcgtagctggcatgatgtgcattattgtgatgattctgacctacaaatatttacagaaacccatgtatgaagtacagtggaaggttgttgaggagataaatggaaacaattatgtttacatagacccaacacaacttccttatgatcacaaatgggagtttcccagaaacaggctgagttttgggaaaaccctgggtgctggagctttcgggaaggttgttgaggcaactgcttatggcttaattaagtcagatgcggccatgactgtcgctgtaaagatgctcaagccgagtgcccatttgacagaacgggaagccctcatgtctgaactcaaagtcctgagttaccttggtaatcacatgaatattgtgaatctacttggagcctgcaccattggagggcccaccctggtcattacagaatattgttgctatggtgatcttttgaattttttgagaagaaaacgtgattcatttatttgttcaaagcaggaagatcatgcagaagctgcactttataagaatcttctgcattcaaaggagtcttcctgcagcgatagtactaatgagtacatggacatgaaacctggagtttcttatgttgtcccaaccaaggccgacaaaaggagatctgtgagaataggctcatacatagaaagagatgtgactcccgccatcatggaggatgacgagttggccctagacttagaagacttgctgagcttttcttaccaggtggcaaagggcatggctttcctcgcctccaagaattgtattcacagagacttggcagccagaaatatcctccttactcatggtcggatcacaaagatttgtgattttggtctagccagagacatcaagaatgattctaattatgtggttaaaggaaacgctcgactacctgtgaagtggatggcacctgaaagcattttcaactgtgtatacacgtttgaaagtgacgtctggtcctatgggatttttctttgggagctgttctctttaggaagcagcccctatcctggaatgccggtcgattctaagttctacaagatgatcaaggaaggcttccggatgctcagccctgaacacgcacctgctgaaatgtatgacataatgaagacttgctgggatgcagatcccctaaaaagaccaacattcaagcaaattgttcagctaattgagaagcagatttcagagagcaccaatcatatttactccaacttagcaaactgcagccccaaccgacagaagcccgtggtagaccattctgtgcggatcaattctgtcggcagcaccgcttcctcctcccagcctctgcttgtgcacgacgatgtc

SEQ ID NO: 9598 - protein, 976 aa, Homo sapiens [sequence omitted]

SEQ ID NO: 9599 - DNA, 14733 bp, Homo sapiens
  CDS (1)..(14733)
atgtcgtcggaggaggacaagagcgtggagcagccgcagccgccgccaccaccccccgaggagcctggagccccggccccgagccccgcagccgcagacaaaagacctcggggccggcctcgcaaagatggcgcttcccctttccagagagccagaaagaaacctcgaagtagggggaaaactgcagtggaagatgaggacagcatggatgggctggagacaacagaaacagaaacgattgtggaaacagaaatcaaagaacaatctgcagaagaggatgctgaagcagaagtggataacagcaaacagctaattccaactcttcagcgatctgtgtctgaggaatcggcaaactccctggtctctgttggtgtagaagccaaaatcagtgaacagctctgcgctttttgttactgtggggaaaaaagttccttaggacaaggagacttaaaacaattcagaataacgcctggatttatcttgccatggagaaaccaaccttctaacaagaaggacattgatgacaacagcaatggaacctatgagaaaatgcaaaactcagcaccacgaaaacaaagaggacagagaaaagaacgatctcctcagcagaatatagtatcttgtgtaagtgtaagcacccagacagcttcagatgatcaagctggtaaactgtgggatgaactcagtctggttgggcttccagatgccattgatatccaagccttatttgattctacaggcacttgttgggctcatcaccgttgtgtggagtggtcactaggagtatgccagatggaagaaccattgttagtgaacgtggacaaagctgttgtctcagggagcacagaacgatgtgcattttgtaagcaccttggagccactatcaaatgctgtgaagagaaatgtacccagatgtatcattatccttgtgctgcaggagccggcacctttcaggatttcagtcacatcttcctgctttgtccagaacacattgaccaagctcctgaaagatcgaaggaagatgcaaactgtgcagtgtgcgacagcccgggagacctcttagatcagttcttttgtactacttgtggtcagcactatcatggaatgtgcctggatatagcggttactccattaaaacgtgcaggttggcaatgtcctgagtgcaaagtgtgccagaactgcaaacaatcgggagaagatagcaagatgctagtgtgtgatacgtgtgacaaagggtatcatactttttgtcttcaaccagttatgaaatcagtaccaaccaatggctggaaatgcaaaaattgcagaatatgtatagagtgtggcacacggtctagttctcagtggcaccacaattgcctgatatgtgacaattgttaccaacagcaggataacttatgtcccttctgtgggaagtgttatcatccagaattgcagaaagacatgcttcattgtaatatgtgcaaaaggtgggttcacctagagtgtgacaaaccaacagatcatgaactggatactcagctcaaagaagagtatatctgcatgtattgtaaacacctgggagctgagatggatcctttacagccaggtgaggaagtggagatagctgagctcactacagattataacaatgaaatggaagttgaaggccctgaagatcaaatggtattctcagagcaggcagctaataaagatgtcaacggtcaggagtccactcctggaattgttccagatacggttcaagtccacactgaagagcaacagaagagtcatccctcagaaagtcttgacacagatagtcttcttattgctgtatcatcccaacatacagtgaatactgaattggaaaaacagatttctaatgaagttgatagtgaagacctgaaaatgtcttctgaagtgaagcatatttgtggcgaagatcaaattgaagataaaatggaagtgacagaaaacattgaagtcgttacacaccagatcactgtgcagcaagaacaactgcagttgttagaggaacctgaaacagtggtatccagagaagaatcaaggcctccaaaattagtcatggaatctgtcactcttccactagaaaccttagtgtccccacatgaggaaagtatttcattatgtcctgaggaacagttggttatagaaaggctacaaggagaaaaggaacagaaagaaaattctgaactttctactggattgatggactctgaaatgactcctacaattgagggttgtgtgaaagatgtttcataccaaggaggcaaatctataaagttatcatctgagacagagtcatcattttcatcatcagcagacataagcaaggcagatgtgtcttcctccccaacaccttcttcagacttgccttcgcatgacatgctgcataattacccttcagctcttagttcctctgctggaaacatcatgccaacaacttacatctcagtcactccaaaaattggcatgggtaaaccagctattactaagagaaaattttctcctggtagacctcggtccaaacagggggcttggagtacccataatacagtgagcccaccttcctggtccccagacatttcagaaggtcgggaaatttttaaacccaggcagcttcctggcagtgccatttggagcatcaaagtgggccgtgggtctggatttccaggaaagcggagacctcgaggtgcaggactgtcggggcgaggtggccgaggcaggtcaaagctgaaaagtggaatcggagctgttgtattacctggggtgtctactgcagatatttcatcaaataaggatgatgaagaaaactctatgcacaatacagttgtgttgttttctagcagtgacaagttcactttgaatcaggatatgtgtgtagtttgtggcagttttggccaaggagcagaaggaagattacttgcctgttctcagtgtggtcagtgttaccatccatactgtgtcagtattaagatcactaaagtggttcttagcaaaggttggaggtgtcttgagtgcactgtgtgtgaggcctgtgggaaggcaactgacccaggaagactcctgctgtgtgatgactgtgacataagttatcacacctactgcctagaccctccattgcagacagttcccaaaggaggctggaagtgcaaatggtgtgtttggtgcagacactgtggagcaacatctgcaggtctaagatgtgaatggcagaacaattacacacagtgcgctccttgtgcaagcttatcttcctgtccagtctgctatcgaaactatagagaagaagatcttattctgcaatgtagacaatgtgatagatggatgcatgcagtttgtcagaacttaaatactgaggaagaagtggaaaatgtagcagacattggttttgattgtagcatgtgcagaccctatatgcctgcgtctaatgtgccttcctcagactgctgtgaatcttcacttgtagcacaaattgtcacaaaagtaaaagagctagacccacccaagacttatacccaggatggtgtgtgtttgactgaatcagggatgactcagttacagagcctcacagttacagttccaagaagaaaacggtcaaaaccaaaattgaaattgaagattataaatcagaatagcgtggccgtccttcagacccctccagacatccaatcagagcattcaagggatggtgaaatggatgatagtcgagaaggagaacttatggattgtgatggaaaatcagaatctagtcctgagcgggaagctgtggatgatgaaactaagggagtggaaggaacagatggtgtcaaaaagagaaaaaggaaaccatacagaccaggtattggtggatttgtggtgcggcaaagaagtcgaactgggcaagggaaaaccaaaagatctgtgatcagaaaagattcctcaggctctatttccgagcagttaccttgcagagatgatggctggagtgagcagttaccagatactttagttgatgaatctgtttctgttactgaaagcactgaaaaaataaagaagagataccgaaaaaggaaaaataagcttgaagaaactttccctgcctatttacaagaagctttctttggaaaagatcttctagatacaagtagacaaagcaagataagtttagataatctgtcagaagatggagctcagcttttatataaaacaaacatgaacacaggtttcttggatccttccttagatccactacttagttcatcctcggctccaacaaaatctggaactcacggtcctgctgatgacccattagctgatatttctgaagttttaaacacagatgatgacattcttggaataatttcagatgatctagcaaaatcagttgatcattcagatattggtcctgtcactgatgatccttcctctttgcctcagccaaatgtcaatcagagttcacgaccattaagtgaagaacagctagatgggatcctcagtcctgaactagacaaaatggtcacagatggagcaattcttggaaaattatataaaattccagagcttggcggaaaagatgttgaagacttatttacagctgtacttagtcctgcgaacactcagccaactccattgccacagcctcccccaccaacacagctgttgccaatacacaatcaggatgctttttcacggatgcctctcatgaatggccttattggatccagtcctcatctcccacataattctttgccgcctggaagcggactgggaactttctctgcaattgcacaatcctcttatcctgatgccagggataaaaattcagcctttaatccaatggcaagtgatcctaacaactcttggacatcatcagctcccactgtggaaggagaaaatgacacaatgtcgaatgcccagagaagcacgcttaagtgggagaaagaggaggctctgggtgaaatggcaactgttgccccagttctctacaccaatattaatttccccaacttaaaggaagaattccctgattggactactagagtgaagcaaattgccaaattgtggagaaaagcaagctcacaagaaagagcaccatatgtgcaaaaagccagagataacagagctgctttacgcattaataaagtacagatgtcaaatgattccatgaaaaggcagcaacagcaagatagcattgatcccagctctcgtattgattcggagctttttaaagatcctttaaagcaaagagaatcagaacatgaacaggaatggaaatttagacagcaaatgcgtcagaaaagtaagcagcaagctaaaattgaagccacacagaaacttgaacaggtgaaaaatgagcagcagcagcagcaacaacagcaatttggttctcagcatcttctggtgcagtctggttcagatacaccaagtagtgggatacagagtcccttgacacctcagcctggcaatggaaatatgtctcctgcacagtcattccataaagaactgtttacaaaacagccacccagtacccctacgtctacatcttcagatgatgtgtttgtaaagccacaagctccacctcctcctccagccccatcccggattcccatccaggatagtctttctcaggctcagacttctcagccaccctcaccgcaagtgttttcacctgggtcctctaactcacgaccaccatctccaatggatccatatgcaaaaatggttggtacccctcgaccacctcctgtgggccatagtttttccagaagaaattctgctgcaccagtggaaaactgtacacctttatcatcggtatctaggccccttcaaatgaatgagacaacagcaaataggccatcccctgtcagagatttatgttcttcttccacgacaaataatgacccctatgcaaaacctccagacacacctaggcctgtgatgacagatcaatttcccaaatccttgggcctatcccggtctcctgtagtttcagaacaaactgcaaaaggccctatagcagctggaaccagtgatcactttactaaaccatctcctagggcagatgtgtttcaaagacaaaggatacctgactcatatgcacgacccttgttgacacctgcacctcttgatagtggtcctggaccttttaagactccaatgcaacctcctccatcctctcaggatccttatggatcagtgtcacaggcatcaaggcgattgtctgttgacccttatgaaaggcctgctttgacaccaagacctatagataatttttctcataatcagtcaaatgatccatatagtcagcctccccttaccccacatccagcagtgaatgaatcttttgcccatccttcaagggctttttcccagcctggaaccatatcaaggccaacatctcaggacccatactcccaacccccaggaactccacgacctgttgtagattcttattcccaatcttcgggaacagctaggtccaatacagacccttactctcaacctcctggaactccccggcctactactgttgacccatatagtcagcagccccaaaccccaagaccatctacacaaactgacttgtttgttacacctgtaacaaatcagaggcattctgatccatatgctcatcctcctggaacaccaagacctggaatttctgtcccttactctcagccaccagcaacaccaaggccaaggatttcagagggttttactaggtcctcaatgacaagaccagtcctcatgccaaatcaggatcctttcctgcaagcagcacaaaaccgaggaccagctttacctggcccgttggtaaggccacctgatacatgttcccagacacctaggccccctggacctggtctttcagacacatttagccgtgtttccccatctgctgcccgtgatccctatgatcagtctccaatgactccaagatctcagtctgactcttttggaacaagtcaaactgcccatgatgttgctgatcagccaaggcctggatcagaggggagcttctgtgcatcttcaaactctccaatgcactcccaaggccagcagttctctggtgtctcccaacttcctggacctgtgtcaacttcaggagtaactgatacacagaatactgtaaatatggcccaagcagatacagagaaattgagacagcggcagaagttacgtgaaatcattctccagcagcaacagcagaagaagattgcaggtcgacaggagaaggggtcacaggactcacccgcagtgcctcatccagggcctcttcaacactggcaaccagagaatgttaaccaggctttcaccagacccccacctccctatcctgggaacattaggtctcctgttgcccctcctttaggacctagatatgctgttttcccaaaagatcagcgtggaccctatcctcctgatgttgctagtatggggatgagacctcatggatttagatttggatttccaggaggtagtcatggtaccatgccgagtcaagagcgcttccttgtgcctcctcagcaaatacagggatctggagtttctccacagctaagaagatcagtatctgtagatatgcctaggcctttaaataactcacaaatgaataatccagttggacttcctcagcatttttcaccacagagcttgccagttcagcagcacaacatactgggccaagcatatattgaactgagacatagggctcctgacggaaggcaacggctgcctttcagtgctccacctggcagcgttgtagaggcatcttctaatctgagacatggaaacttcattccccggccagactttccgggccctagacacacagaccccatgcgacgacctccccagggtctacctaatcagctacctgtgcacccagatttggaacaagtgccaccatctcaacaagagcaaggtcattctgtccattcatcttctatggtcatgaggactctgaaccatccactaggtggtgaattttcagaagctcctttgtcaacatctgtaccgtctgaaacaacgtctgataatttacagataaccacccagccttctgatggtctagaggaaaaacttgattctgatgacccttctgtgaaggaactggatgttaaagaccttgagggggttgaagtcaaagacttagatgatgaagatcttgaaaacttaaatttagatacagaggatggcaaggtagttgaattggatactttagataatttggaaactaatgatcccaacctggatgacctcttaaggtcaggagagtttgatatcattgcatatacagatccagaacttgacatgggagataagaaaagcatgtttaatgaggaactagaccttccaattgatgataagttagataatcagtgtgtatctgttgaaccaaaaaaaagggaacaagaaaacaaaactctggttctctctgataaacattcaccacagaaaaaatccactgttaccaatgaggtaaaaacggaagtactgtctccaaattctaaggtggaatccaaatgtgaaactgaaaaaaatgatgagaataaagataatgttgacactccttgctcacaggcttctgctcactcagacctaaatgatggagaaaagacttctttgcatccttgtgatccagatctatttgagaaaagagccaatcgagaaactgctggccccagtgcaaatgtcattcaggcatccactcaactacctgctcaagatgtaataaactcttgtggcataactggatcaactccagttctctcaagcttacttgctaatgagaaatctgataattcagacattaggccatcggggtctccaccaccaccaactctgccggcctccccatccaatcatgtgtcaagtttgcctcctttcatagcaccgcctggccgtgttttggataatgccatgaattctaatgtgacagtagtctctagggtaaaccatgttttttctcagggtgtgcaggtaaacccagggctcattccaggtcaatcaacagttaaccacagtctggggacaggaaaacctgcaactcaaactgggcctcaaacaagtcagtctggtaccagtagcatgtctggaccccaacagctaatgattcctcaaacattagcacagcagaatagagagaggccccttcttctagaagaacagcctctacttctacaggatcttttggatcaagaaaggcaagaacagcagcagcaaagacagatgcaagccatgattcgtcagcgatcagaaccgttcttccctaatattgattttgatgcaattacagatcctataatgaaagccaaaatggtggcccttaaaggtataaataaagtgatggcacaaaacaatctgggcatgccaccaatggtgatgagcaggttcccttttatgggccaggtggtaactggaacacagaacagtgaaggacagaaccttggaccacaggccattcctcaggatggcagtataacacatcagatttctaggcctaatcctccaaattttggtccaggctttgtcaatgattcacagcgtaagcagtatgaagagtggctccaggagacccaacagctgcttcaaatgcagcagaagtatcttgaagaacaaattggtgctcacagaaaatctaagaaggccctttcagctaaacaacgtactgccaagaaagctgggcgtgaatttccagaggaagatgcagaacaactcaagcatgttactgaacagcaaagcatggttcagaaacagctagaacagattcgtaaacaacagaaagaacatgctgaattgattgaagattatcggatcaaacagcagcagcaatgtgcaatggccccacctaccatgatgcccagtgtccagccccagccacccctaattccaggtgccactccacccaccatgagccaacccacctttcccatggtgccacagcagcttcagcaccagcagcacacaacagttatttctggccatactagccctgttagaatgcccagtttacctggatggcaacccaacagtgctcctgcccacctgcccctcaatcctcctagaattcagcccccaattgcccagttaccaataaaaacttgtacaccagccccagggacagtctcaaatgcaaatccacagagtggaccaccacctcgggtagaatttgatgacaacaatccctttagtgaaagttttcaagaacgggaacgtaaggaacgtttacgagaacagcaagagagacaacggatccaactcatgcaggaggtagatagacaaagagctttgcagcagaggatggaaatggagcagcatggtatggtgggctctgagataagtagtagtaggacatctgtgtcccagattcccttctacagttccgacttaccttgtgattttatgcaacctctaggaccccttcagcagtctccacaacaccaacagcaaatggggcaggttttacagcagcagaatatacaacaaggatcaattaattcaccctccacccaaactttcatgcagactaatgagcgaaggcaggtaggccctccttcatttgttcctgattcaccatcaatccctgttggaagcccaaatttttcttctgtgaagcagggacatggaaatctttctgggaccagcttccagcagtccccagtgaggccttcttttacacctgctttaccagcagcacctccagtagctaatagcagtctcccatgtggccaagattctactataacccatggacacagttatccgggatcaacccaatcgctcattcagttgtattctgatataatcccagaggaaaaagggaaaaagaaaagaacaagaaagaagaaaagagatgatgatgcagaatccaccaaggctccatcaactccccattcagatataactgccccaccgactccaggcatctcagaaactacctctactcctgcagtgagcacacccagtgagcttcctcaacaagccgaccaagagtcggtggaaccagtcggcccatccactcccaatatggcagcaggccagctatgtacagaattagagaacaaactgcccaatagtgatttctcacaagcaactccaaatcaacagacgtatgcaaattcagaagtagacaagctctccatggaaacccctgccaaaacagaagagataaaactggaaaaggctgagacagagtcctgcccaggccaagaggagcctaaattggaggaacagaatggtagtaaggtagaaggaaacgctgtagcctgtcctgtctcctcagcacagagtcctccccattctgctggggcccctgctgccaaaggagactcagggaatgaacttctgaaacacttgttgaaaaataaaaagtcatcttctcttttgaatcaaaaacctgagggcagtatttgttcagaagatgactgtacaaaggataataaactagttgagaagcagaacccagctgaaggactgcaaactttgggggctcaaatgcaaggtggttttggatgtggcaaccagttgccaaaaacagatggaggaagtgaaaccaagaaacagcgaagcaaacggactcagaggacgggtgagaaagcagcacctcgctcaaagaaaaggaaaaaggacgaagaggagaaacaagctatgtactctagcactgacacgtttacccacttgaaacagcagaataatttaagtaatcctccaacaccccctgcctctcttcctcctacaccacctcctatggcttgtcagaagatggccaatggttttgcaacaactgaagaacttgctggaaaagccggagtgttagtgagccatgaagttaccaaaactctaggacctaaaccatttcagctgcccttcagaccccaggacgacttgttggcccgagcccttgctcagggccccaagacagttgatgtgccagcctccctcccaacaccacctcataacaatcaggaagaattaaggatacaggatcactgtggtgatcgagatactcctgacagttttgttccctcatcctctcctgagagtgtggttggggtagaagtgagcaggtatccagatctgtcattggtcaaggaggagcctccagaaccggtgccgtcccccatcattccaattcttcctagcactgctgggaaaagttcagaatcaagaaggaatgacatcaaaactgagccaggcactttatattttgcgtcaccttttggtccttccccaaatggtcccagatcaggtcttatatctgtagcaattactctgcatcctacagctgctgagaacattagcagtgttgtggctgcattttccgaccttcttcacgtccgaatccctaacagctatgaggttagcagtgctccagatgtcccatccatgggtttggtcagtagccacagaatcaacccgggtttggagtatcgacagcatttacttctccgtgggcctccgccaggatctgcaaaccctcccagattagtgagctcttaccggctgaagcagcctaatgtaccatttcctccaacaagcaatggtctttctggatataaggattctagtcatggtattgcagaaagcgcagcactcagaccacagtggtgttgtcattgtaaagtggttattcttggaagtggtgtgcggaaatctttcaaagatctgacccttttgaacaaggattcccgagaaagcaccaagagggtagagaaggacattgtcttctgtagtaataactgctttattctttattcatcaactgcacaagcgaaaaactcagaaaacaaggaatccattccttcattgccacaatcacctatgagagaaacgccttccaaagcatttcatcagtacagcaacaacatctccactttggatgtgcactgtctcccccagctcccagagaaagcttctccccctgcctcaccacccatcgccttccctcctgcttttgaagcagcccaagtcgaggccaagccagatgagctgaaggtgacagtcaagctgaagcctcggctaagagctgtccatggtgggtttgaagattgcaggccgctcaataaaaaatggagaggaatgaaatggaagaagtggagcattcatattgtaatccctaaggggacatttaaaccaccttgtgaggatgaaatagatgaatttctaaagaaattgggcacttcccttaaacctgatcctgtgcccaaagactatcggaaatgttgcttttgtcatgaagaaggtgatggattgacagatggaccagcaaggctactcaaccttgacttggatctgtgggtccacttgaactgcgctctgtggtccacggaggtctatgagactcaggctggtgccttaataaatgtggagctagctctgaggagaggcctacaaatgaaatgtgtcttctgtcacaagacgggtgccactagtggatgccacagatttcgatgcaccaacatttatcacttcacttgcgccattaaagcacaatgcatgttttttaaggacaaaactatgctttgccccatgcacaaaccaaagggaattcatgagcaagaattaagttactttgcagtcttcaggagggtctatgttcagcgtgatgaggtgcgacagattgctagcatcgtgcaacgaggagaacgggaccatacctttcgcgtgggtagcctcatcttccacacaattggtcagctgcttccacagcagatgcaagcattccattctcctaaagcactcttccctgtgggctatgaagccagccggctgtactggagcactcgctatgccaataggcgctgccgctacctgtgctccattgaggagaaggatgggcgcccagtgtttgtcatcaggattgtggaacaaggccatgaagacctggttctaagtgacatctcacctaaaggtgtctgggataagattttggagcctgtggcatgtgtgagaaaaaagtctgaaatgctccagcttttcccagcgtatttaaaaggagaggatctgtttggcctgaccgtctctgcagtggcacgcatagcggaatcacttcctggggttgaggcatgtgaaaattataccttccgatacggccgaaatcctctcatggaacttcctcttgccgttaaccccacaggttgtgcccgttctgaacctaaaatgagtgcccatgtcaagaggtttgtgttaaggcctcacaccttaaacagcaccagcacctcaaagtcatttcagagcacagtcactggagaactgaacgcaccttatagtaaacagtttgttcactccaagtcatcgcagtaccggaagatgaaaactgaatggaaatccaatgtgtatctggcacggtctcggattcaggggctgggcctgtatgctgctcgagacattgagaaacacaccatggtcattgagtacatcgggactatcattcgaaacgaagtagccaacaggaaagagaagctttatgagtctcagaaccgtggtgtgtacatgttccgcatggataacgaccatgtgattgacgcgacgctcacaggagggcccgcaaggtatatcaaccattcgtgtgcacctaattgtgtggctgaagtggtgacttttgagagaggacacaaaattatcatcagctccagtcggagaatccagaaaggagaagagctctgctatgactataagtttgactttgaagatgaccagcacaagattccgtgtcactgtggagctgtgaactgccggaagtggatgaac

SEQ ID NO: 9600 - protein, 4911 aa, Homo sapiens
MSSEEDKSVEQPQPPPPPPEEPGAPAPSPAAADKRPRGRPRKDGASPFQRARKKPRSRGKTAVEDEDSMDGLETTETETIVETEIKEQSAEEDAEAEVDNSKQLIPTLQRSVSEESANSLVSVGVEAKISEQLCAFCYCGEKSSLGQGDLKQFRITPGFILPWRNQPSNKKDIDDNSNGTYEKMQNSAPRKQRGQRKERSPQQNIVSCVSVSTQTASDDQAGKLWDELSLVGLPDAIDIQALFDSTGTCWAHHRCVEWSLGVCQMEEPLLVNVDKAVVSGSTERCAFCKHLGATIKCCEEKCTQMYHYPCAAGAGTFQDFSHIFLLCPEHIDQAPERSKEDANCAVCDSPGDLLDQFFCTTCGQHYHGMCLDIAVTPLKRAGWQCPECKVCQNCKQSGEDSKMLVCDTCDKGYHTFCLQPVMKSVPTNGWKCKNCRICIECGTRSSSQWHHNCLICDNCYQQQDNLCPFCGKCYHPELQKDMLHCNMCKRWVHLECDKPTDHELDTQLKEEYICMYCKHLGAEMDPLQPGEEVEIAELTTDYNNEMEVEGPEDQMVFSEQAANKDVNGQESTPGIVPDTVQVHTEEQQKSHPSESLDTDSLLIAVSSQHTVNTELEKQISNEVDSEDLKMSSEVKHICGEDQIEDKMEVTENIEVVTHQITVQQEQLQLLEEPETVVSREESRPPKLVMESVTLPLETLVSPHEESISLCPEEQLVIERLQGEKEQKENSELSTGLMDSEMTPTIEGCVKDVSYQGGKSIKLSSETESSFSSSADISKADVSSSPTPSSDLPSHDMLHNYPSALSSSAGNIMPTTYISVTPKIGMGKPAITKRKFSPGRPRSKQGAWSTHNTVSPPSWSPDISEGREIFKPRQLPGSAIWSIKVGRGSGFPGKRRPRGAGLSGRGGRGRSKLKSGIGAVVLPGVSTADISSNKDDEENSMHNTVVLFSSSDKFTLNQDMCVVCGSFGQGAEGRLLACSQCGQCYHPYCVSIKITKVVLSKGWRCLECTVCEACGKATDPGRLLLCDDCDISYHTYCLDPPLQTVPKGGWKCKWCVWCRHCGATSAGLRCEWQNNYTQCAPCASLSSCPVCYRNYREEDLILQCRQCDRWMHAVCQNLNTEEEVENVADIGFDCSMCRPYMPASNVPSSDCCESSLVAQIVTKVKELDPPKTYTQDGVCLTESGMTQLQSLTVTVPRRKRSKPKLKLKIINQNSVAVLQTPPDIQSEHSRDGEMDDSREGELMDCDGKSESSPEREAVDDETKGVEGTDGVKKRKRKPYRPGIGGFVVRQRSRTGQGKTKRSVIRKDSSGSISEQLPCRDDGWSEQLPDTLVDESVSVTESTEKIKKRYRKRKNKLEETFPAYLQEAFFGKDLLDTSRQSKISLDNLSEDGAQLLYKTNMNTGFLDPSLDPLLSSSSAPTKSGTHGPADDPLADISEVLNTDDDILGIISDDLAKSVDHSDIGPVTDDPSSLPQPNVNQSSRPLSEEQLDGILSPELDKMVTDGAILGKLYKIPELGGKDVEDLFTAVLSPANTQPTPLPQPPPPTQLLPIHNQDAFSRMPLMNGLIGSSPHLPHNSLPPGSGLGTFSAIAQSSYPDARDKNSAFNPMASDPNNSWTSSAPTVEGENDTMSNAQRSTLKWEKEEALGEMATVAPVLYTNINFPNLKEEFPDWTTRVKQIAKLWRKASSQERAPYVQKARDNRAALRINKVQMSNDSMKRQQQQDSIDPSSRIDSELFKDPLKQRESEHEQEWKFRQQMRQKSKQQAKIEATQKLEQVKNEQQQQQQQQFGSQHLLVQSGSDTPSSGIQSPLTPQPGNGNMSPAQSFHKELFTKQPPSTPTSTSSDDVFVKPQAPPPPPAPSRIPIQDSLSQAQTSQPPSPQVFSPGSSNSRPPSPMDPYAKMVGTPRPPPVGHSFSRRNSAAPVENCTPLSSVSRPLQMNETTANRPSPVRDLCSSSTTNNDPYAKPPDTPRPVMTDQFPKSLGLSRSPVVSEQTAKGPIAAGTSDHFTKPSPRADVFQRQRIPDSYARPLLTPAPLDSGPGPFKTPMQPPPSSQDPYGSVSQASRRLSVDPYERPALTPRPIDNFSHNQSNDPYSQPPLTPHPAVNESFAHPSRAFSQPGTISRPTSQDPYSQPPGTPRPVVDSYSQSSGTARSNTDPYSQPPGTPRPTTVDPYSQQPQTPRPSTQTDLFVTPVTNQRHSDPYAHPPGTPRPGISVPYSQPPATPRPRISEGFTRSSMTRPVLMPNQDPFLQAAQNRGPALPGPLVRPPDTCSQTPRPPGPGLSDTFSRVSPSAARDPYDQSPMTPRSQSDSFGTSQTAHDVADQPRPGSEGSFCASSNSPMHSQGQQFSGVSQLPGPVSTSGVTDTQNTVNMAQADTEKLRQRQKLREIILQQQQQKKIAGRQEKGSQDSPAVPHPGPLQHWQPENVNQAFTRPPPPYPGNIRSPVAPPLGPRYAVFPKDQRGPYPPDVASMGMRPHGFRFGFPGGSHGTMPSQERFLVPPQQIQGSGVSPQLRRSVSVDMPRPLNNSQMNNPVGLPQHFSPQSLPVQQHNILGQAYIELRHRAPDGRQRLPFSAPPGSVVEASSNLRHGNFIPRPDFPGPRHTDPMRRPPQGLPNQLPVHPDLEQVPPSQQEQGHSVHSSSMVMRTLNHPLGGEFSEAPLSTSVPSETTSDNLQITTQPSDGLEEKLDSDDPSVKELDVKDLEGVEVKDLDDEDLENLNLDTEDGKVVELDTLDNLETNDPNLDDLLRSGEFDIIAYTDPELDMGDKKSMFNEELDLPIDDKLDNQCVSVEPKKREQENKTLVLSDKHSPQKKSTVTNEVKTEVLSPNSKVESKCETEKNDENKDNVDTPCSQASAHSDLNDGEKTSLHPCDPDLFEKRANRETAGPSANVIQASTQLPAQDVINSCGITGSTPVLSSLLANEKSDNSDIRPSGSPPPPTLPASPSNHVSSLPPFIAPPGRVLDNAMNSNVTVVSRVNHVFSQGVQVNPGLIPGQSTVNHSLGTGKPATQTGPQTSQSGTSSMSGPQQLMIPQTLAQQNRERPLLLEEQPLLLQDLLDQERQEQQQQRQMQAMIRQRSEPFFPNIDFDAITDPIMKAKMVALKGINKVMAQNNLGMPPMVMSRFPFMGQVVTGTQNSEGQNLGPQAIPQDGSITHQISRPNPPNFGPGFVNDSQRKQYEEWLQETQQLLQMQQKYLEEQIGAHRKSKKALSAKQRTAKKAGREFPEEDAEQLKHVTEQQSMVQKQLEQIRKQQKEHAELIEDYRIKQQQQCAMAPPTMMPSVQPQPPLIPGATPPTMSQPTFPMVPQQLQHQQHTTVISGHTSPVRMPSLPGWQPNSAPAHLPLNPPRIQPPIAQLPIKTCTPAPGTVSNANPQSGPPPRVEFDDNNPFSESFQERERKERLREQQERQRIQLMQEVDRQRALQQRMEMEQHGMVGSEISSSRTSVSQIPFYSSDLPCDFMQPLGPLQQSPQHQQQMGQVLQQQNIQQGSINSPSTQTFMQTNERRQVGPPSFVPDSPSIPVGSPNFSSVKQGHGNLSGTSFQQSPVRPSFTPALPAAPPVANSSLPCGQDSTITHGHSYPGSTQSLIQLYSDIIPEEKGKKKRTRKKKRDDDAESTKAPSTPHSDITAPPTPGISETTSTPAVSTPSELPQQADQESVEPVGPSTPNMAAGQLCTELENKLPNSDFSQATPNQQTYANSEVDKLSMETPAKTEEIKLEKAETESCPGQEEPKLEEQNGSKVEGNAVACPVSSAQSPPHSAGAPAAKGDSGNELLKHLLKNKKSSSLLNQKPEGSICSEDDCTKDNKLVEKQNPAEGLQTLGAQMQGGFGCGNQLPKTDGGSETKKQRSKRTQRTGEKAAPRSKKRKKDEEEKQAMYSSTDTFTHLKQQNNLSNPPTPPASLPPTPPPMACQKMANGFATTEELAGKAGVLVSHEVTKTLGPKPFQLPFRPQDDLLARALAQGPKTVDVPASLPTPPHNNQEELRIQDHCGDRDTPDSFVPSSSPESVVGVEVSRYPDLSLVKEEPPEPVPSPIIPILPSTAGKSSESRRNDIKTEPGTLYFASPFGPSPNGPRSGLISVAITLHPTAAENISSVVAAFSDLLHVRIPNSYEVSSAPDVPSMGLVSSHRINPGLEYRQHLLLRGPPPGSANPPRLVSSYRLKQPNVPFPPTSNGLSGYKDSSHGIAESAALRPQWCCHCKVVILGSGVRKSFKDLTLLNKDSRESTKRVEKDIVFCSNNCFILYSSTAQAKNSENKESIPSLPQSPMRETPSKAFHQYSNNISTLDVHCLPQLPEKASPPASPPIAFPPAFEAAQVEAKPDELKVTVKLKPRLRAVHGGFEDCRPLNKKWRGMKWKKWSIHIVIPKGTFKPPCEDEIDEFLKKLGTSLKPDPVPKDYRKCCFCHEEGDGLTDGPARLLNLDLDLWVHLNCALWSTEVYETQAGALINVELALRRGLQMKCVFCHKTGATSGCHRFRCTNIYHFTCAIKAQCMFFKDKTMLCPMHKPKGIHEQELSYFAVFRRVYVQRDEVRQIASIVQRGERDHTFRVGSLIFHTIGQLLPQQMQAFHSPKALFPVGYEASRLYWSTRYANRRCRYLCSIEEKDGRPVFVIRIVEQGHEDLVLSDISPKGVWDKILEPVACVRKKSEMLQLFPAYLKGEDLFGLTVSAVARIAESLPGVEACENYTFRYGRNPLMELPLAVNPTGCARSEPKMSAHVKRFVLRPHTLNSTSTSKSFQSTVTGELNAPYSKQFVHSKSSQYRKMKTEWKSNVYLARSRIQGLGLYAARDIEKHTMVIEYIGTIIRNEVANRKEKLYESQNRGVYMFRMDNDHVIDATLTGGPARYINHSCAPNCVAEVVTFERGHKIIISSSRRIQKGEELCYDYKFDFEDDQHKIPCHCGAVNCRKWMN

SEQ ID NO: 9601 - DNA, 570 bp, Homo sapiens
  CDS (1)..(570)
atgactgaatataaacttgtggtagttggagctggtggcgtaggcaagagtgccttgacgatacagctaattcagaatcattttgtggacgaatatgatccaacaatagaggattcctacaggaagcaagtagtaattgatggagaaacctgtctcttggatattctcgacacagcaggtcaagaggagtacagtgcaatgagggaccagtacatgaggactggggagggctttctttgtgtatttgccataaataatactaaatcatttgaagatattcaccattatagagaacaaattaaaagagttaaggactctgaagatgtacctatggtcctagtaggaaataaatgtgatttgccttctagaacagtagacacaaaacaggctcaggacttagcaagaagttatggaattccttttattgaaacatcagcaaagacaagacagagagtggaggatgctttttatacattggtgagggagatccgacaatacagattgaaaaaaatcagcaaagaagaaaagactcctggctgtgtgaaaattaaaaaatgcattataatgtaa

SEQ ID NO: 9602 - protein, 189 aa, Homo sapiens [sequence omitted]

SEQ ID NO: 9603 - DNA, 567 bp, Homo sapiens
  CDS (1)..(567)
atgactgaatataaacttgtggtagttggagctggtggcgtaggcaagagtgccttgacgatacagctaattcagaatcattttgtggacgaatatgatccaacaatagaggattcctacaggaagcaagtagtaattgatggagaaacctgtctcttggatattctcgacacagcaggtcaagaggagtacagtgcaatgagggaccagtacatgaggactggggagggctttctttgtgtatttgccataaataatactaaatcatttgaagatattcaccattatagagaacaaattaaaagagttaaggactctgaagatgtacctatggtcctagtaggaaataaatgtgatttgccttctagaacagtagacacaaaacaggctcaggacttagcaagaagttatggaattccttttattgaaacatcagcaaagacaagacagggtgttgatgatgccttctatacattagttcgagaaattcgaaaacataaagaaaagatgagcaaagatggtaaaaagaagaaaaagaagtcaaagacaaagtgtgtaattatgtaa

SEQ ID NO: 9604 - protein, 188 aa, Homo sapiens [sequence omitted]

SEQ ID NO: 9605 - DNA, 1179 bp, Homo sapiens
  CDS (1)..(1179)
atgcccaagaagaagccgacgcccatccagctgaacccggcccccgacggctctgcagttaacgggaccagctctgcggagaccaacttggaggccttgcagaagaagctggaggagctagagcttgatgagcagcagcgaaagcgccttgaggcctttcttacccagaagcagaaggtgggagaactgaaggatgacgactttgagaagatcagtgagctgggggctggcaatggcggtgtggtgttcaaggtctcccacaagccttctggcctggtcatggccagaaagctaattcatctggagatcaaacccgcaatccggaaccagatcataagggagctgcaggttctgcatgagtgcaactctccgtacatcgtgggcttctatggtgcgttctacagcgatggcgagatcagtatctgcatggagcacatggatggaggttctctggatcaagtcctgaagaaagctggaagaattcctgaacaaattttaggaaaagttagcattgctgtaataaaaggcctgacatatctgagggagaagcacaagatcatgcacagagatgtcaagccctccaacatcctagtcaactcccgtggggagatcaagctctgtgactttggggtcagcgggcagctcatcgactccatggccaactccttcgtgggcacaaggtcctacatgtcgccagaaagactccaggggactcattactctgtgcagtcagacatctggagcatgggactgtctctggtagagatggcggttgggaggtatcccatccctcctccagatgccaaggagctggagctgatgtttgggtgccaggtggaaggagatgcggctgagaccccacccaggccaaggacccccgggaggccccttagctcatacggaatggacagccgacctcccatggcaatttttgagttgttggattacatagtcaacgagcctcctccaaaactgcccagtggagtgttcagtctggaatttcaagattttgtgaataaatgcttaataaaaaaccccgcagagagagcagatttgaagcaactcatggttcatgcttttatcaagagatctgatgctgaggaagtggattttgcaggttggctctgctccaccatcggccttaaccagcccagcacaccaacccatgctgctggcgtc

SEQ ID NO: 9606 - protein, 393 aa, Homo sapiens [sequence omitted]

SEQ ID NO: 9607 - DNA, 483 bp, Homo sapiens
  CDS (1)..(483)
atgagcgataacgatgacatcgaggtggagagcgacgaagagcaaccgaggtttcaatctgcggctgacaaacgggctcatcataatgcactggaacgaaaacgtagggaccacatcaaagacagctttcacagtttgcgggactcagtcccatcactccaaggagagaaggcatcccgggcccaaatcctagacaaagccacagaatatatccagtatatgcgaaggaaaaaccacacacaccagcaagatattgacgacctcaagcggcagaatgctcttctggagcagcaagtccgtgcactggagaaggcgaggtcaagtgcccaactgcagaccaactacccctcctcagacaacagcctctacaccaacgccaagggcagcaccatctctgccttcgatgggggctcggactccagctcggagtctgagcctgaagagccccaaagcaggaagaagctccggatggaggccagctaa

SEQ ID NO: 9608 - protein, 160 aa, Homo sapiens
MSDNDDIEVESDEEQPRFQSAADKRAHHNALERKRRDHIKDSFHSLRDSVPSLQGEKASRAQILDKATEYIQYMRRKNHTHQQDIDDLKRQNALLEQQVRALEKARSSAQLQTNYPSSDNSLYTNAKGSTISAFDGGSDSSSESEPEEPQSRKKLRMEAS

SEQ ID NO: 9609 - DNA, 1476 bp, Homo sapiens
  CDS (1)..(1476)
atgtgcaataccaacatgtctgtacctactgatggtgctgtaaccacctcacagattccagcttcggaacaagagaccctggttagaccaaagccattgcttttgaagttattaaagtctgttggtgcacaaaaagacacttatactatgaaagaggttcttttttatcttggccagtatattatgactaaacgattatatgatgagaagcaacaacatattgtatattgttcaaatgatcttctaggagatttgtttggcgtgccaagcttctctgtgaaagagcacaggaaaatatataccatgatctacaggaacttggtagtagtcaatcagcaggaatcatcggactcaggtacatctgtgagtgagaacaggtgtcaccttgaaggtgggagtgatcaaaaggaccttgtacaagagcttcaggaagagaaaccttcatcttcacatttggtttctagaccatctacctcatctagaaggagagcaattagtgagacagaagaaaattcagatgaattatctggtgaacgacaaagaaaacgccacaaatctgatagtatttccctttcctttgatgaaagcctggctctgtgtgtaataagggagatatgttgtgaaagaagcagtagcagtgaatctacagggacgccatcgaatccggatcttgatgctggtgtaagtgaacattcaggtgattggttggatcaggattcagtttcagatcagtttagtgtagaatttgaagttgaatctctcgactcagaagattatagccttagtgaagaaggacaagaactctcagatgaagatgatgaggtatatcaagttactgtgtatcaggcaggggagagtgatacagattcatttgaagaagatcctgaaatttccttagctgactattggaaatgcacttcatgcaatgaaatgaatcccccccttccatcacattgcaacagatgttgggcccttcgtgagaattggcttcctgaagataaagggaaagataaaggggaaatctctgagaaagccaaactggaaaactcaacacaagctgaagagggctttgatgttcctgattgtaaaaaaactatagtgaatgattccagagagtcatgtgttgaggaaaatgatgataaaattacacaagcttcacaatcacaagaaagtgaagactattctcagccatcaacttctagtagcattatttatagcagccaagaagatgtgaaagagtttgaaagggaagaaacccaagacaaagaagagagtgtggaatctagtttgccccttaatgccattgaaccttgtgtgatttgtcaaggtcgacctaaaaatggttgcattgtccatggcaaaacaggacatcttatggcctgctttacatgtgcaaagaagctaaagaaaaggaataagccctgcccagtatgtagacaaccaattcaaatgattgtgctaacttatttcccctag

SEQ ID NO: 9610 - protein, 491 aa, Homo sapiens
MCNTNMSVPTDGAVTTSQIPASEQETLVRPKPLLLKLLKSVGAQKDTYTMKEVLFYLGQYIMTKRLYDEKQQHIVYCSNDLLGDLFGVPSFSVKEHRKIYTMIYRNLVVVNQQESSDSGTSVSENRCHLEGGSDQKDLVQELQEEKPSSSHLVSRPSTSSRRRAISETEENSDELSGERQRKRHKSDSISLSFDESLALCVIREICCERSSSSESTGTPSNPDLDAGVSEHSGDWLDQDSVSDQFSVEFEVESLDSEDYSLSEEGQELSDEDDEVYQVTVYQAGESDTDSFEEDPEISLADYWKCTSCNEMNPPLPSHCNRCWALRENWLPEDKGKDKGEISEKAKLENSTQAEEGFDVPDCKKTIVNDSRESCVEENDDKITQASQSQESEDYSQPSTSSSIIYSSQEDVKEFEREETQDKEESVESSLPLNAIEPCVICQGRPKNGCIVHGKTGHLMACFTCAKKLKKRNKPCPVCRQPIQMIVLTYFP

SEQ ID NO: 9611 - DNA, 1473 bp, Homo sapiens
  CDS (1)..(1473)
atgacatcattttccacctctgctcagtgttcaacatctgacagtgcttgcaggatctctcctggacaaatcaatcaggtacgaccaaaactgccgcttttgaagattttgcatgcagcaggtgcgcaaggtgaaatgttcactgttaaagaggtcatgcactatttaggtcagtacataatggtgaagcaactttatgatcagcaggagcagcatatggtatattgtggtggagatcttttgggagaactactgggacgtcagagcttctccgtgaaagacccaagccctctctatgatatgctaagaaagaatcttgtcactttagccactgctactacagatgctgctcagactctcgctctcgcacaggatcacagtatggatattccaagtcaagaccaactgaagcaaagtgcagaggaaagttccacttccagaaaaagaactacagaagacgatatccccacactgcctacctcagagcataaatgcatacattctagagaagatgaagacttaattgaaaatttagcccaagatgaaacatctaggctggaccttggatttgaggagtgggatgtagctggcctgccttggtggtttttaggaaacttgagaagcaactatacacctagaagtaatggctcaactgatttacagacaaatcaggatgtgggtactgccattgtttcagatactacagatgacttgtggtttttgaatgagtcagtatcagagcagttaggtgttggaataaaagttgaagctgctgatactgaacaaacaagtgaagaagtagggaaagtaagtgacaaaaaggtgattgaagtgggaaaaaatgatgacctggaggactctaagtccttaagtgatgataccgatgtagaggttacctctgaggatgagtggcagtgtactgaatgcaagaaatttaactctccaagcaagaggtactgttttcgttgttgggccttgaggaaggattggtattcagattgttcaaagttaacccattctctctccacgtctgatatcactgccatacctgaaaaggaaaatgaaggaaatgatgtccctgattgtcgaagaaccatttcggctcctgtcgttagacctaaagatgcgtatataaagaaagaaaactccaaactttttgatccctgcaactcagtggaattcttggatttggctcacagttctgaaagccaagagaccatctcaagcatgggagaacagttagataacctttctgaacagagaacagatacagaaaacatggaggattgccagaatctcttgaagccatgtagcttatgtgagaaaagaccacgagacgggaacattattcatggaaggacgggccatcttgtcacttgttttcactgtgccagaagactaaagaaggctggggcttcatgccctatttgcaagaaagagattcagctggttattaaggtttttatagcataa

SEQ ID NO: 9612 - protein, 490 aa, Homo sapiens
MTSFSTSAQCSTSDSACRISPGQINQVRPKLPLLKILHAAGAQGEMFTVKEVMHYLGQYIMVKQLYDQQEQHMVYCGGDLLGELLGRQSFSVKDPSPLYDMLRKNLVTLATATTDAAQTLALAQDHSMDIPSQDQLKQSAEESSTSRKRTTEDDIPTLPTSEHKCIHSREDEDLIENLAQDETSRLDLGFEEWDVAGLPWWFLGNLRSNYTPRSNGSTDLQTNQDVGTAIVSDTTDDLWFLNESVSEQLGVGIKVEAADTEQTSEEVGKVSDKKVIEVGKNDDLEDSKSLSDDTDVEVTSEDEWQCTECKKFNSPSKRYCFRCWALRKDWYSDCSKLTHSLSTSDITAIPEKENEGNDVPDCRRTISAPVVRPKDAYIKKENSKLFDPCNSVEFLDLAHSSESQETISSMGEQLDNLSEQRTDTENMEDCQNLLKPCSLCEKRPRDGNIIHGRTGHLVTCFHCARRLKKAGASCPICKKEIQLVIKVFIA

SEQ ID NO: 9613 - DNA, 4170 bp, Homo sapiens
  CDS (1)..(4170)
atgaaggcccccgctgtgcttgcacctggcatcctcgtgctcctgtttaccttggtgcagaggagcaatggggagtgtaaagaggcactagcaaagtccgagatgaatgtgaatatgaagtatcagcttcccaacttcaccgcggaaacacccatccagaatgtcattctacatgagcatcacattttccttggtgccactaactacatttatgttttaaatgaggaagaccttcagaaggttgctgagtacaagactgggcctgtgctggaacacccagattgtttcccatgtcaggactgcagcagcaaagccaatttatcaggaggtgtttggaaagataacatcaacatggctctagttgtcgacacctactatgatgatcaactcattagctgtggcagcgtcaacagagggacctgccagcgacatgtctttccccacaatcatactgctgacatacagtcggaggttcactgcatattctccccacagatagaagagcccagccagtgtcctgactgtgtggtgagcgccctgggagccaaagtcctttcatctgtaaaggaccggttcatcaacttctttgtaggcaataccataaattcttcttatttcccagatcatccattgcattcgatatcagtgagaaggctaaaggaaacgaaagatggttttatgtttttgacggaccagtcctacattgatgttttacctgagttcagagattcttaccccattaagtatgtccatgcctttgaaagcaacaattttatttacttcttgacggtccaaagggaaactctagatgctcagacttttcacacaagaataatcaggttctgttccataaactctggattgcattcctacatggaaatgcctctggagtgtattctcacagaaaagagaaaaaagagatccacaaagaaggaagtgtttaatatacttcaggctgcgtatgtcagcaagcctggggcccagcttgctagacaaataggagccagcctgaatgatgacattcttttcggggtgttcgcacaaagcaagccagattctgccgaaccaatggatcgatctgccatgtgtgcattccctatcaaatatgtcaacgacttcttcaacaagatcgtcaacaaaaacaatgtgagatgtctccagcatttttacggacccaatcatgagcactgctttaataggacacttctgagaaattcatcaggctgtgaagcgcgccgtgatgaatatcgaacagagtttaccacagctttgcagcgcgttgacttattcatgggtcaattcagcgaagtcctcttaacatctatatccaccttcattaaaggagacctcaccatagctaatcttgggacatcagagggtcgcttcatgcaggttgtggtttctcgatcaggaccatcaacccctcatgtgaattttctcctggactcccatccagtgtctccagaagtgattgtggagcatacattaaaccaaaatggctacacactggttatcactgggaagaagatcacgaagatcccattgaatggcttgggctgcagacatttccagtcctgcagtcaatgcctctctgccccaccctttgttcagtgtggctggtgccacgacaaatgtgtgcgatcggaggaatgcctgagcgggacatggactcaacagatctgtctgcctgcaatctacaaggttttcccaaatagtgcaccccttgaaggagggacaaggctgaccatatgtggctgggactttggatttcggaggaataataaatttgatttaaagaaaactagagttctccttggaaatgagagctgcaccttgactttaagtgagagcacgatgaatacattgaaatgcacagttggtcctgccatgaataagcatttcaatatgtccataattatttcaaatggccacgggacaacacaatacagtacattctcctatgtggatcctgtaataacaagtatttcgccgaaatacggtcctatggctggtggcactttacttactttaactggaaattacctaaacagtgggaattctagacacatttcaattggtggaaaaacatgtactttaaaaagtgtgtcaaacagtattcttgaatgttataccccagcccaaaccatttcaactgagtttgctgttaaattgaaaattgacttagccaaccgagagacaagcatcttcagttaccgtgaagatcccattgtctatgaaattcatccaaccaaatcttttattagtggtgggagcacaataacaggtgttgggaaaaacctgaattcagttagtgtcccgagaatggtcataaatgtgcatgaagcaggaaggaactttacagtggcatgtcaacatcgctctaattcagagataatctgttgtaccactccttccctgcaacagctgaatctgcaactccccctgaaaaccaaagcctttttcatgttagatgggatcctttccaaatactttgatctcatttatgtacataatcctgtgtttaagccttttgaaaagccagtgatgatctcaatgggcaatgaaaatgtactggaaattaagggaaatgatattgaccctgaagcagttaaaggtgaagtgttaaaagttggaaataagagctgtgagaatatacacttacattctgaagccgttttatgcacggtccccaatgacctgctgaaattgaacagcgagctaaatatagagtggaagcaagcaatttcttcaaccgtccttggaaaagtaatagttcaaccagatcagaatttcacaggattgattgctggtgttgtctcaatatcaacagcactgttattactacttgggtttttcctgtggctgaaaaagagaaagcaaattaaagatctgggcagtgaattagttcgctacgatgcaagagtacacactcctcatttggataggcttgtaagtgcccgaagtgtaagcccaactacagaaatggtttcaaatgaatctgtagactaccgagctacttttccagaagatcagtttcctaattcatctcagaacggttcatgccgacaagtgcagtatcctctgacagacatgtcccccatcctaactagtggggactctgatatatccagtccattactgcaaaatactgtccacattgacctcagtgctctaaatccagagctggtccaggcagtgcagcatgtagtgattgggcccagtagcctgattgtgcatttcaatgaagtcataggaagagggcattttggttgtgtatatcatgggactttgttggacaatgatggcaagaaaattcactgtgctgtgaaatccttgaacagaatcactgacataggagaagtttcccaatttctgaccgagggaatcatcatgaaagattttagtcatcccaatgtcctctcgctcctgggaatctgcctgcgaagtgaagggtctccgctggtggtcctaccatacatgaaacatggagatcttcgaaatttcattcgaaatgagactcataatccaactgtaaaagatcttattggctttggtcttcaagtagccaaaggcatgaaatatcttgcaagcaaaaagtttgtccacagagacttggctgcaagaaactgtatgctggatgaaaaattcacagtcaaggttgctgattttggtcttgccagagacatgtatgataaagaatactatagtgtacacaacaaaacaggtgcaaagctgccagtgaagtggatggctttggaaagtctgcaaactcaaaagtttaccaccaagtcagatgtgtggtcctttggcgtgctcctctgggagctgatgacaagaggagccccaccttatcctgacgtaaacacctttgatataactgtttacttgttgcaagggagaagactcctacaacccgaatactgcccagaccccttatatgaagtaatgctaaaatgctggcaccctaaagccgaaatgcgcccatccttttctgaactggtgtcccggatatcagcgatcttctctactttcattggggagcactatgtccatgtgaacgctacttatgtgaacgtaaaatgtgtcgctccgtatccttctctgttgtcatcagaagataacgctgatgatgaggtggacacacgaccagcctccttctgggagacatca

SEQ ID NO: 9614 - protein, 1390 aa, Homo sapiens
MKAPAVLAPGILVLLFTLVQRSNGECKEALAKSEMNVNMKYQLPNFTAETPIQNVILHEHHIFLGATNYIYVLNEEDLQKVAEYKTGPVLEHPDCFPCQDCSSKANLSGGVWKDNINMALVVDTYYDDQLISCGSVNRGTCQRHVFPHNHTADIQSEVHCIFSPQIEEPSQCPDCVVSALGAKVLSSVKDRFINFFVGNTINSSYFPDHPLHSISVRRLKETKDGFMFLTDQSYIDVLPEFRDSYPIKYVHAFESNNFIYFLTVQRETLDAQTFHTRIIRFCSINSGLHSYMEMPLECILTEKRKKRSTKKEVFNILQAAYVSKPGAQLARQIGASLNDDILFGVFAQSKPDSAEPMDRSAMCAFPIKYVNDFFNKIVNKNNVRCLQHFYGPNHEHCFNRTLLRNSSGCEARRDEYRTEFTTALQRVDLFMGQFSEVLLTSISTFIKGDLTIANLGTSEGRFMQVVVSRSGPSTPHVNFLLDSHPVSPEVIVEHTLNQNGYTLVITGKKITKIPLNGLGCRHFQSCSQCLSAPPFVQCGWCHDKCVRSEECLSGTWTQQICLPAIYKVFPNSAPLEGGTRLTICGWDFGFRRNNKFDLKKTRVLLGNESCTLTLSESTMNTLKCTVGPAMNKHFNMSIIISNGHGTTQYSTFSYVDPVITSISPKYGPMAGGTLLTLTGNYLNSGNSRHISIGGKTCTLKSVSNSILECYTPAQTISTEFAVKLKIDLANRETSIFSYREDPIVYEIHPTKSFISGGSTITGVGKNLNSVSVPRMVINVHEAGRNFTVACQHRSNSEIICCTTPSLQQLNLQLPLKTKAFFMLDGILSKYFDLIYVHNPVFKPFEKPVMISMGNENVLEIKGNDIDPEAVKGEVLKVGNKSCENIHLHSEAVLCTVPNDLLKLNSELNIEWKQAISSTVLGKVIVQPDQNFTGLIAGVVSISTALLLLLGFFLWLKKRKQIKDLGSELVRYDARVHTPHLDRLVSARSVSPTTEMVSNESVDYRATFPEDQFPNSSQNGSCRQVQYPLTDMSPILTSGDSDISSPLLQNTVHIDLSALNPELVQAVQHVVIGPSSLIVHFNEVIGRGHFGCVYHGTLLDNDGKKIHCAVKSLNRITDIGEVSQFLTEGIIMKDFSHPNVLSLLGICLRSEGSPLVVLPYMKHGDLRNFIRNETHNPTVKDLIGFGLQVAKGMKYLASKKFVHRDLAARNCMLDEKFTVKVADFGLARDMYDKEYYSVHNKTGAKLPVKWMALESLQTQKFTTKSDVWSFGVLLWELMTRGAPPYPDVNTFDITVYLLQGRRLLQPEYCPDPLYEVMLKCWHPKAEMRPSFSELVSRISAIFSTFIGEHYVHVNATYVNVKCVAPYPSLLSSEDNADDEVDTRPASFWETS

SEQ ID NO: 9615 - DNA, 7647 bp, Homo sapiens
  CDS (1)..(7647)
atgcttggaaccggacctgccgccgccaccaccgctgccaccacatctagcaatgtgagcgtcctgcagcagtttgccagtggcctaaagagccggaatgaggaaaccagggccaaagccgccaaggagctccagcactatgtcaccatggaactccgagagatgagtcaagaggagtctactcgcttctatgaccaactgaaccatcacatttttgaattggtttccagctcagatgccaatgagaggaaaggtggcatcttggccatagctagcctcataggagtggaaggtgggaatgccacccgaattggcagatttgccaactatcttcggaacctcctcccctccaatgacccagttgtcatggaaatggcatccaaggccattggccgtcttgccatggcaggggacacttttaccgctgagtacgtggaatttgaggtgaagcgagccctggaatggctgggtgctgaccgcaatgagggccggagacatgcagctgtcctggttctccgtgagctggccatcagcgtccctaccttcttcttccagcaagtgcaacccttctttgacaacatttttgtggccgtgtgggaccccaaacaggccatccgtgagggagctgtagccgcccttcgtgcctgtctgattctcacaacccagcgtgagccgaaggagatgcagaagcctcagtggtacaggcacacatttgaagaagcagagaagggatttgatgagaccttggccaaagagaagggcatgaatcgggatgatcggatccatggagccttgttgatccttaacgagctggtccgaatcagcagcatggagggagagcgtctgagagaagaaatggaagaaatcacacagcagcagctggtacacgacaagtactgcaaagatctcatgggcttcggaacaaaacctcgtcacattacccccttcaccagtttccaggctgtacagccccagcagtcaaatgccttggtggggctgctggggtacagctctcaccaaggcctcatgggatttgggacctcccccagtccagctaagtccaccctggtggagagccggtgttgcagagacttgatggaggagaaatttgatcaggtgtgccagtgggtgctgaaatgcaggaatagcaagaactcgctgatccaaatgacaatccttaatttgttgccccgcttggctgcattccgaccttctgccttcacagatacccagtatctccaagataccatgaaccatgtcctaagctgtgtcaagaaggagaaggaacgtacagcggccttccaagccctggggctactttctgtggctgtgaggtctgagtttaaggtctatttgcctcgcgtgctggacatcatccgagcggccctgcccccaaaggacttcgcccataagaggcagaaggcaatgcaggtggatgccacagtcttcacttgcatcagcatgctggctcgagcaatggggccaggcatccagcaggatatcaaggagctgctggagcccatgctggcagtgggactaagccctgccctcactgcagtgctctacgacctgagccgtcagattccacagctaaagaaggacattcaagatgggctactgaaaatgctgtccctggtccttatgcacaaaccccttcgccacccaggcatgcccaagggcctggcccatcagctggcctctcctggcctcacgaccctccctgaggccagcgatgtgggcagcatcactcttgccctccgaacgcttggcagctttgaatttgaaggccactctctgacccaatttgttcgccactgtgcggatcatttcctgaacagtgagcacaaggagatccgcatggaggctgcccgcacctgctcccgcctgctcacaccctccatccacctcatcagtggccatgctcatgtggttagccagaccgcagtgcaagtggtggcagatgtgcttagcaaactgctcgtagttgggataacagatcctgaccctgacattcgctactgtgtcttggcgtccctggacgagcgctttgatgcacacctggcccaggcggagaacttgcaggccttgtttgtggctctgaatgaccaggtgtttgagatccgggagctggccatctgcactgtgggccgactcagtagcatgaaccctgcctttgtcatgcctttcctgcgcaagatgctcatccagattttgacagagttggagcacagtgggattggaagaatcaaagagcagagtgcccgcatgctggggcacctggtctccaatgccccccgactcatccgcccctacatggagcctattctgaaggcattaattttgaaactgaaagatccagaccctgatccaaacccaggtgtgatcaataatgtcctggcaacaataggagaattggcacaggttagtggcctggaaatgaggaaatgggttgatgaactttttattatcatcatggacatgctccaggattcctctttgttggccaaaaggcaggtggctctgtggaccctgggacagttggtggccagcactggctatgtagtagagccctacaggaagtaccctactttgcttgaggtgctactgaattttctgaagactgagcagaaccagggtacacgcagagaggccatccgtgtgttagggcttttaggggctttggatccttacaagcacaaagtgaacattggcatgatagaccagtcccgggatgcctctgctgtcagcctgtcagaatccaagtcaagtcaggattcctctgactatagcactagtgaaatgctggtcaacatgggaaacttgcctctggatgagttctacccagctgtgtccatggtggccctgatgcggatcttccgagaccagtcactctctcatcatcacaccatggttgtccaggccatcaccttcatcttcaagtccctgggactcaaatgtgtgcagttcctgccccaggtcatgcccacgttccttaacgtcattcgagtctgtgatggggccatccgggaatttttgttccagcagctgggaatgttggtgtcctttgtgaagagccacatcagaccttatatggatgaaatagtcaccctcatgagagaattctgggtcatgaacacctcaattcagagcacgatcattcttctcattgagcaaattgtggtagctcttgggggtgaatttaagctctacctgccccagctgatcccacacatgctgcgtgtcttcatgcatgacaacagcccaggccgcattgtctctatcaagttactggctgcaatccagctgtttggcgccaacctggatgactacctgcatttactgctgcctcctattgttaagttgtttgatgcccctgaagctccactgccatctcgaaaggcagcgctagagactgtggaccgcctgacggagtccctggatttcactgactatgcctcccggatcattcaccctattgttcgaacactggaccagagcccagaactgcgctccacagccatggacacgctgtcttcacttgtttttcagctggggaagaagtaccaaattttcattccaatggtgaataaagttctggtgcgacaccgaatcaatcatcagcgctatgatgtgctcatctgcagaattgtcaagggatacacacttgctgatgaagaggaggatcctttgatttaccagcatcggatgcttaggagtggccaaggggatgcattggctagtggaccagtggaaacaggacccatgaagaaactgcacgtcagcaccatcaacctccaaaaggcctggggcgctgccaggagggtctccaaagatgactggctggaatggctgagacggctgagcctggagctgctgaaggactcatcatcgccctccctgcgctcctgctgggccctggcacaggcctacaacccgatggccagggatctcttcaatgctgcatttgtgtcctgctggtctgaactgaatgaagatcaacaggatgagctcatcagaagcatcgagttggccctcacctcacaagacatcgctgaagtcacacagaccctcttaaacttggctgaattcatggaacacagtgacaagggccccctgccactgagagatgacaatggcattgttctgctgggtgagagagctgccaagtgccgagcatatgccaaagcactacactacaaagaactggagttccagaaaggccccacccctgccattctagaatctctcatcagcattaataataagctacagcagccggaggcagcggccggagtgttagaatatgccatgaaacactttggagagctggagatccaggctacctggtatgagaaactgcacgagtgggaggatgcccttgtggcctatgacaagaaaatggacaccaacaaggacgacccagagctgatgctgggccgcatgcgctgcctcgaggccttgggggaatggggtcaactccaccagcagtgctgtgaaaagtggaccctggttaatgatgagacccaagccaagatggcccggatggctgctgcagctgcatggggtttaggtcagtgggacagcatggaagaatacacctgtatgatccctcgggacacccatgatggggcattttatagagctgtgctggcactgcatcaggacctcttctccttggcacaacagtgcattgacaaggccagggacctgctggatgctgaattaactgcgatggcaggagagagttacagtcgggcatatggggccatggtttcttgccacatgctgtccgagctggaggaggttatccagtacaaacttgtccccgagcgacgagagatcatccgccagatctggtgggagagactgcagggctgccagcgtatcgtagaggactggcagaaaatccttatggtgcggtcccttgtggtcagccctcatgaagacatgagaacctggctcaagtatgcaagcctgtgcggcaagagtggcaggctggctcttgctcataaaactttagtgttgctcctgggagttgatccgtctcggcaacttgaccatcctctgccaacagttcaccctcaggtgacctatgcctacatgaaaaacatgtggaagagtgcccgcaagatcgatgccttccagcacatgcagcattttgtccagaccatgcagcaacaggcccagcatgccatcgctactgaggaccagcagcataagcaggaactgcacaagctcatggcccgatgcttcctgaaacttggagagtggcagctgaatctacagggcatcaatgagagcacaatccccaaagtgctgcagtactacagcgccgccacagagcacgaccgcagctggtacaaggcctggcatgcgtgggcagtgatgaacttcgaagctgtgctacactacaaacatcagaaccaagcccgcgatgagaagaagaaactgcgtcatgccagcggggccaacatcaccaacgccaccactgccgccaccacggccgccactgccaccaccactgccagcaccgagggcagcaacagtgagagcgaggccgagagcaccgagaacagccccaccccatcgccgctgcagaagaaggtcactgaggatctgtccaaaaccctcctgatgtacacggtgcctgccgtccagggcttcttccgttccatctccttgtcacgaggcaacaacctccaggatacactcagagttctcaccttatggtttgattatggtcactggccagatgtcaatgaggccttagtggagggggtgaaagccatccagattgatacctggctacaggttatacctcagctcattgcaagaattgatacgcccagacccttggtgggacgtctcattcaccagcttctcacagacattggtcggtaccacccccaggccctcatctacccactgacagtggcttctaagtctaccacgacagcccggcacaatgcagccaacaagattctgaagaacatgtgtgagcacagcaacaccctggtccagcaggccatgatggtgagcgaggagctgatccgagtggccatcctctggcatgagatgtggcatgaaggcctggaagaggcatctcgtttgtactttggggaaaggaacgtgaaaggcatgtttgaggtgctggagcccttgcatgctatgatggaacggggcccccagactctgaaggaaacatcctttaatcaggcctatggtcgagatttaatggaggcccaagagtggtgcaggaagtacatgaaatcagggaatgtcaaggacctcacccaagcctgggacctctattatcatgtgttccgacgaatctcaaagcagctgcctcagctcacatccttagagctgcaatatgtttccccaaaacttctgatgtgccgggaccttgaattggctgtgccaggaacatatgaccccaaccagccaatcattcgcattcagtccatagcaccgtctttgcaagtcatcacatccaagcagaggccccggaaattgacacttatgggcagcaacggacatgagtttgttttccttctaaaaggccatgaagatctgcgccaggatgagcgtgtgatgcagctcttcggcctggttaacacccttctggccaatgacccaacatctcttcggaaaaacctcagcatccagagatacgctgtcatccctttatcgaccaactcgggcctcattggctgggttccccactgtgacacactgcacgccctcatccgggactacagggagaagaagaagatccttctcaacatcgagcatcgcatcatgttgcggatggctccggactatgaccacttgactctgatgcagaaggtggaggtgtttgagcatgccgtcaataatacagctggggacgacctggccaagctgctgtggctgaaaagccccagctccgaggtgtggtttgaccgaagaaccaattatacccgttctttagcggtcatgtcaatggttgggtatattttaggcctgggagatagacacccatccaacctgatgctggaccgtctgagtgggaagatcctgcacattgactttggggactgctttgaggttgctatgacccgagagaagtttccagagaagattccatttagactaacaagaatgttgaccaatgctatggaggttacaggcctggatggcaactacagaatcacatgccacacagtgatggaggtgctgcgagagcacaaggacagtgtcatggccgtgctggaagcctttgtctatgaccccttgctgaactggaggctgatggacacaaataccaaaggcaacaagcgatcccgaacgaggacggattcctactctgctggccagtcagtcgaaattttggacggtgtggaacttggagagccagcccataagaaaacggggaccacagtgccagaatctattcattctttcattggagacggtttggtgaaaccagaggccctaaataagaaagctatccagattattaacagggttcgagataagctcactggtcgggacttctctcatgatgacactttggatgttccaacgcaagttgagctgctcatcaaacaagcgacatcccatgaaaacctctgccagtgctatattggctggtgccctttctgg

SEQ ID NO: 9616 - protein, 2549 aa, Homo sapiens
MLGTGPAAATTAATTSSNVSVLQQFASGLKSRNEETRAKAAKELQHYVTMELREMSQEESTRFYDQLNHHIFELVSSSDANERKGGILAIASLIGVEGGNATRIGRFANYLRNLLPSNDPVVMEMASKAIGRLAMAGDTFTAEYVEFEVKRALEWLGADRNEGRRHAAVLVLRELAISVPTFFFQQVQPFFDNIFVAVWDPKQAIREGAVAALRACLILTTQREPKEMQKPQWYRHTFEEAEKGFDETLAKEKGMNRDDRIHGALLILNELVRISSMEGERLREEMEEITQQQLVHDKYCKDLMGFGTKPRHITPFTSFQAVQPQQSNALVGLLGYSSHQGLMGFGTSPSPAKSTLVESRCCRDLMEEKFDQVCQWVLKCRNSKNSLIQMTILNLLPRLAAFRPSAFTDTQYLQDTMNHVLSCVKKEKERTAAFQALGLLSVAVRSEFKVYLPRVLDIIRAALPPKDFAHKRQKAMQVDATVFTCISMLARAMGPGIQQDIKELLEPMLAVGLSPALTAVLYDLSRQIPQLKKDIQDGLLKMLSLVLMHKPLRHPGMPKGLAHQLASPGLTTLPEASDVGSITLALRTLGSFEFEGHSLTQFVRHCADHFLNSEHKEIRMEAARTCSRLLTPSIHLISGHAHVVSQTAVQVVADVLSKLLVVGITDPDPDIRYCVLASLDERFDAHLAQAENLQALFVALNDQVFEIRELAICTVGRLSSMNPAFVMPFLRKMLIQILTELEHSGIGRIKEQSARMLGHLVSNAPRLIRPYMEPILKALILKLKDPDPDPNPGVINNVLATIGELAQVSGLEMRKWVDELFIIIMDMLQDSSLLAKRQVALWTLGQLVASTGYVVEPYRKYPTLLEVLLNFLKTEQNQGTRREAIRVLGLLGALDPYKHKVNIGMIDQSRDASAVSLSESKSSQDSSDYSTSEMLVNMGNLPLDEFYPAVSMVALMRIFRDQSLSHHHTMVVQAITFIFKSLGLKCVQFLPQVMPTFLNVIRVCDGAIREFLFQQLGMLVSFVKSHIRPYMDEIVTLMREFWVMNTSIQSTIILLIEQIVVALGGEFKLYLPQLIPHMLRVFMHDNSPGRIVSIKLLAAIQLFGANLDDYLHLLLPPIVKLFDAPEAPLPSRKAALETVDRLTESLDFTDYASRIIHPIVRTLDQSPELRSTAMDTLSSLVFQLGKKYQIFIPMVNKVLVRHRINHQRYDVLICRIVKGYTLADEEEDPLIYQHRMLRSGQGDALASGPVETGPMKKLHVSTINLQKAWGAARRVSKDDWLEWLRRLSLELLKDSSSPSLRSCWALAQAYNPMARDLFNAAFVSCWSELNEDQQDELIRSIELALTSQDIAEVTQTLLNLAEFMEHSDKGPLPLRDDNGIVLLGERAAKCRAYAKALHYKELEFQKGPTPAILESLISINNKLQQPEAAAGVLEYAMKHFGELEIQATWYEKLHEWEDALVAYDKKMDTNKDDPELMLGRMRCLEALGEWGQLHQQCCEKWTLVNDETQAKMARMAAAAAWGLGQWDSMEEYTCMIPRDTHDGAFYRAVLALHQDLFSLAQQCIDKARDLLDAELTAMAGESYSRAYGAMVSCHMLSELEEVIQYKLVPERREIIRQIWWERLQGCQRIVEDWQKILMVRSLVVSPHEDMRTWLKYASLCGKSGRLALAHKTLVLLLGVDPSRQLDHPLPTVHPQVTYAYMKNMWKSARKIDAFQHMQHFVQTMQQQAQHAIATEDQQHKQELHKLMARCFLKLGEWQLNLQGINESTIPKVLQYYSAATEHDRSWYKAWHAWAVMNFEAVLHYKHQNQARDEKKKLRHASGANITNATTAATTAATATTTASTEGSNSESEAESTENSPTPSPLQKKVTEDLSKTLLMYTVPAVQGFFRSISLSRGNNLQDTLRVLTLWFDYGHWPDVNEALVEGVKAIQIDTWLQVIPQLIARIDTPRPLVGRLIHQLLTDIGRYHPQALIYPLTVASKSTTTARHNAANKILKNMCEHSNTLVQQAMMVSEELIRVAILWHEMWHEGLEEASRLYFGERNVKGMFEVLEPLHAMMERGPQTLKETSFNQAYGRDLMEAQEWCRKYMKSGNVKDLTQAWDLYYHVFRRISKQLPQLTSLELQYVSPKLLMCRDLELAVPGTYDPNQPIIRIQSIAPSLQVITSKQRPRKLTLMGSNGHEFVFLLKGHEDLRQDERVMQLFGLVNTLLANDPTSLRKNLSIQRYAVIPLSTNSGLIGWVPHCDTLHALIRDYREKKKILLNIEHRIMLRMAPDYDHLTLMQKVEVFEHAVNNTAGDDLAKLLWLKSPSSEVWFDRRTNYTRSLAVMSMVGYILGLGDRHPSNLMLDRLSGKILHIDFGDCFEVAMTREKFPEKIPFRLTRMLTNAMEVTGLDGNYRITCHTVMEVLREHKDSVMAVLEAFVYDPLLNWRLMDTNTKGNKRSRTRTDSYSAGQSVEILDGVELGEPAHKKTGTTVPESIHSFIGDGLVKPEALNKKAIQIINRVRDKLTGRDFSHDDTLDVPTQVELLIKQATSHENLCQCYIGWCPFW

SEQ ID NO: 9617 - DNA, 1365 bp, Homo sapiens
  CDS (1)..(1365)
ctggatttttttcgggtagtggaaaaccagcagcctcccgcgacgatgcccctcaacgttagcttcaccaacaggaactatgacctcgactacgactcggtgcagccgtatttctactgcgacgaggaggagaacttctaccagcagcagcagcagagcgagctgcagcccccggcgcccagcgaggatatctggaagaaattcgagctgctgcccaccccgcccctgtcccctagccgccgctccgggctctgctcgccctcctacgttgcggtcacacccttctcccttcggggagacaacgacggcggtggcgggagcttctccacggccgaccagctggagatggtgaccgagctgctgggaggagacatggtgaaccagagtttcatctgcgacccggacgacgagaccttcatcaaaaacatcatcatccaggactgtatgtggagcggcttctcggccgccgccaagctcgtctcagagaagctggcctcctaccaggctgcgcgcaaagacagcggcagcccgaaccccgcccgcggccacagcgtctgctccacctccagcttgtacctgcaggatctgagcgccgccgcctcagagtgcatcgacccctcggtggtcttcccctaccctctcaacgacagcagctcgcccaagtcctgcgcctcgcaagactccagcgccttctctccgtcctcggattctctgctctcctcgacggagtcctccccgcagggcagccccgagcccctggtgctccatgaggagacaccgcccaccaccagcagcgactctgaggaggaacaagaagatgaggaagaaatcgatgttgtttctgtggaaaagaggcaggctcctggcaaaaggtcagagtctggatcaccttctgctggaggccacagcaaacctcctcacagcccactggtcctcaagaggtgccacgtctccacacatcagcacaactacgcagcgcctccctccactcggaaggactatcctgctgccaagagggtcaagttggacagtgtcagagtcctgagacagatcagcaacaaccgaaaatgcaccagccccaggtcctcggacaccgaggagaatgtcaagaggcgaacacacaacgtcttggagcgccagaggaggaacgagctaaaacggagcttttttgccctgcgtgaccagatcccggagttggaaaacaatgaaaaggcccccaaggtagttatccttaaaaaagccacagcatacatcctgtccgtccaagcagaggagcaaaagctcatttctgaagaggacttgttgcggaaacgacgagaacagttgaaacacaaacttgaacagctacggaactcttgtgcgtaa

SEQ ID NO: 9618 - protein, 454 aa, Homo sapiens
LDFFRVVENQQPPATMPLNVSFTNRNYDLDYDSVQPYFYCDEEENFYQQQQQSELQPPAPSEDIWKKFELLPTPPLSPSRRSGLCSPSYVAVTPFSLRGDNDGGGGSFSTADQLEMVTELLGGDMVNQSFICDPDDETFIKNIIIQDCMWSGFSAAAKLVSEKLASYQAARKDSGSPNPARGHSVCSTSSLYLQDLSAAASECIDPSVVFPYPLNDSSSPKSCASQDSSAFSPSSDSLLSSTESSPQGSPEPLVLHEETPPTTSSDSEEEQEDEEEIDVVSVEKRQAPGKRSESGSPSAGGHSKPPHSPLVLKRCHVSTHQHNYAAPPSTRKDYPAAKRVKLDSVRVLRQISNNRKCTSPRSSDTEENVKRRTHNVLERQRRNELKRSFFALRDQIPELENNEKAPKVVILKKATAYILSVQAEEQKLISEEDLLRKRREQLKHKLEQLRNSCA

SEQ ID NO: 9619 - DNA, 1095 bp, Homo sapiens
  CDS (1)..(1095)
atggactacgactcgtaccagcactatttctacgactatgactgcggggaggatttctaccgctccacggcgcccagcgaggacatctggaagaaattcgagctggtgccatcgccccccacgtcgccgccctggggcttgggtcccggcgcaggggacccggcccccgggattggtcccccggagccgtggcccggagggtgcaccggagacgaagcggaatcccggggccactcgaaaggctggggcaggaactacgcctccatcatacgccgtgactgcatgtggagcggcttctcggcccgggaacggctggagagagctgtgagcgaccggctcgctcctggcgcgccccgggggaacccgcccaaggcgtccgccgccccggactgcactcccagcctcgaagccggcaacccggcgcccgccgccccctgtccgctgggcgaacccaagacccaggcctgctccgggtccgagagcccaagcgactcggagaatgaagaaattgatgttgtgacagtagagaagaggcagtctctgggtattcggaagccggtcaccatcacggtgcgagcagaccccctggatccctgcatgaagcatttccacatctccatccatcagcaacagcacaactatgctgcccgttttcctccagaaagctgctcccaagaagaggcttcagagaggggtccccaagaagaggttctggagagagatgctgcaggggaaaaggaagatgaggaggatgaagagattgtgagtcccccacctgtagaaagtgaggctgcccagtcctgccaccccaaacctgtcagttctgatactgaggatgtgaccaagaggaagaatcacaacttcctggagcgcaagaggcggaatgacctgcgttcgcgattcttggcgctgagggaccaggtgcccaccctggccagctgctccaaggcccccaaagtagtgatcctaagcaaggccttggaatacttgcaagccctggtgggggctgagaagaggatggctacagagaaaagacagctccgatgccggcagcagcagttgcagaaaagaattgcatacctcactggctactaa

SEQ ID NO: 9620 - protein, 364 aa, Homo sapiens
MDYDSYQHYFYDYDCGEDFYRSTAPSEDIWKKFELVPSPPTSPPWGLGPGAGDPAPGIGPPEPWPGGCTGDEAESRGHSKGWGRNYASIIRRDCMWSGFSARERLERAVSDRLAPGAPRGNPPKASAAPDCTPSLEAGNPAPAAPCPLGEPKTQACSGSESPSDSENEEIDVVTVEKRQSLGIRKPVTITVRADPLDPCMKHFHISIHQQQHNYAARFPPESCSQEEASERGPQEEVLERDAAGEKEDEEDEEIVSPPPVESEAAQSCHPKPVSSDTEDVTKRKNHNFLERKRRNDLRSRFLALRDQVPTLASCSKAPKVVILSKALEYLQALVGAEKRMATEKRQLRCRQQQLQKRIAYLTGY

SEQ ID NO: 9621 - DNA, 1395 bp, Homo sapiens
  CDS (1)..(1395)
atgccgagctgctccacgtccaccatgccgggcatgatctgcaagaacccagacctcgagtttgactcgctacagccctgcttctacccggacgaagatgacttctacttcggcggccccgactcgacccccccgggggaggacatctggaagaagtttgagctgctgcccacgcccccgctgtcgcccagccgtggcttcgcggagcacagctccgagcccccgagctgggtcacggagatgctgcttgagaacgagctgtggggcagcccggccgaggaggacgcgttcggcctggggggactgggtggcctcacccccaacccggtcatcctccaggactgcatgtggagcggcttctccgcccgcgagaagctggagcgcgccgtgagcgagaagctgcagcacggccgcgggccgccaaccgccggttccaccgcccagtccccgggagccggcgccgccagccctgcgggtcgcgggcacggcggggctgcgggagccggccgcgccggggccgccctgcccgccgagctcgcccacccggccgccgagtgcgtggatcccgccgtggtcttcccctttcccgtgaacaagcgcgagccagcgcccgtgcccgcagccccggccagtgccccggcggcgggccctgcggtcgcctcgggggcgggtattgccgccccagccggggccccgggggtcgcccctccgcgcccaggcggccgccagaccagcggcggcgaccacaaggccctcagtacctccggagaggacaccctgagcgattcagatgatgaagatgatgaagaggaagatgaagaggaagaaatcgacgtggtcactgtggagaagcggcgttcctcctccaacaccaaggctgtcaccacattcaccatcactgtgcgtcccaagaacgcagccctgggtcccgggagggctcagtccagcgagctgatcctcaaacgatgccttcccatccaccagcagcacaactatgccgccccctctccctacgtggagagtgaggatgcacccccacagaagaagataaagagcgaggcgtccccacgtccgctcaagagtgtcatccccccaaaggctaagagcttgagcccccgaaactctgactcggaggacagtgagcgtcgcagaaaccacaacatcctggagcgccagcgccgcaacgaccttcggtccagctttctcacgctcagggaccacgtgccggagttggtaaagaatgagaaggccgccaaggtggtcattttgaaaaaggccactgagtatgtccactccctccaggccgaggagcaccagcttttgctggaaaaggaaaaattgcaggcaagacagcagcagttgctaaagaaaattgaacacgctcggacttgctag

SEQ ID NO: 9622 - protein, 464 aa, Homo sapiens
MPSCSTSTMPGMICKNPDLEFDSLQPCFYPDEDDFYFGGPDSTPPGEDIWKKFELLPTPPLSPSRGFAEHSSEPPSWVTEMLLENELWGSPAEEDAFGLGGLGGLTPNPVILQDCMWSGFSAREKLERAVSEKLQHGRGPPTAGSTAQSPGAGAASPAGRGHGGAAGAGRAGAALPAELAHPAAECVDPAVVFPFPVNKREPAPVPAAPASAPAAGPAVASGAGIAAPAGAPGVAPPRPGGRQTSGGDHKALSTSGEDTLSDSDDEDDEEEDEEEEIDVVTVEKRRSSSNTKAVTTFTITVRPKNAALGPGRAQSSELILKRCLPIHQQHNYAAPSPYVESEDAPPQKKIKSEASPRPLKSVIPPKAKSLSPRNSDSEDSERRRNHNILERQRRNDLRSSFLTLRDHVPELVKNEKAAKVVILKKATEYVHSLQAEEHQLLLEKEKLQARQQQLLKKIEHARTC

SEQ ID NO: 9623 - DNA, 4275 bp, Homo sapiens
  CDS (1)..(4275)
atgagtggattaggagaaaacttggatccactggccagtgattcacgaaaacgcaaattgccatgtgatactccaggacaaggtcttacctgcagtggtgaaaaacggagacgggagcaggaaagtaaatatattgaagaattggctgagctgatatctgccaatcttagtgatattgacaatttcaatgtcaaaccagataaatgtgcgattttaaaggaaacagtaagacagatacgtcaaataaaagagcaaggaaaaactatttccaatgatgatgatgttcaaaaagccgatgtatcttctacagggcagggagttattgataaagactccttaggaccgcttttacttcaggcattggatggtttcctatttgtggtgaatcgagacggaaacattgtatttgtatcagaaaatgtcacacaatacctgcaatataagcaagaggacctggttaacacaagtgtttacaatatcttacatgaagaagacagaaaggattttcttaagaatttaccaaaatctacagttaatggagtttcctggacaaatgagacccaaagacaaaaaagccatacatttaattgccgtatgttgatgaaaacaccacatgatattctggaagacataaacgccagtcctgaaatgcgccagagatatgaaacaatgcagtgctttgccctgtctcagccacgagctatgatggaggaaggggaagatttgcaatcttgtatgatctgtgtggcacgccgcattactacaggagaaagaacatttccatcaaaccctgagagctttattaccagacatgatctttcaggaaaggttgtcaatatagatacaaattcactgagatcctccatgaggcctggctttgaagatataatccgaaggtgtattcagagattttttagtctaaatgatgggcagtcatggtcccagaaacgtcactatcaagaagcttatcttaatggccatgcagaaaccccagtatatcgattctcgttggctgatggaactatagtgactgcacagacaaaaagcaaactcttccgaaatcctgtaacaaatgatcgacatggctttgtctcaacccacttccttcagagagaacagaatggatatagaccaaacccaaatcctgttggacaagggattagaccacctatggctggatgcaacagttcggtaggcggcatgagtatgtcgccaaaccaaggcttacagatgccgagcagcagggcctatggcttggcagaccctagcaccacagggcagatgagtggagctaggtatgggggttccagtaacatagcttcattgacccctgggccaggcatgcaatcaccatcttcctaccagaacaacaactatgggctcaacatgagtagccccccacatgggagtcctggtcttgccccaaaccagcagaatatcatgatttctcctcgtaatcgtgggagtccaaagatagcctcacatcagttttctcctgttgcaggtgtgcactctcccatggcatcttctggcaatactgggaaccacagcttttccagcagctctctcagtgccctgcaagccatcagtgaaggtgtggggacttcccttttatctactctgtcatcaccaggccccaaattggataactctcccaatatgaatattacccaaccaagtaaagtaagcaatcaggattccaagagtcctctgggcttttattgcgaccaaaatccagtggagagttcaatgtgtcagtcaaatagcagagatcacctcagtgacaaagaaagtaaggagagcagtgttgagggggcagagaatcaaaggggtcctttggaaagcaaaggtcataaaaaattactgcagttacttacctgttcttctgatgaccggggtcattcctccttgaccaactcccccctagattcaagttgtaaagaatcttctgttagtgtcaccagcccctctggagtctcctcctctacatctggaggagtatcctctacatccaatatgcatgggtcactgttacaagagaagcaccggattttgcacaagttgctgcagaatgggaattcaccagctgaggtagccaagattactgcagaagccactgggaaagacaccagcagtataacttcttgtggggacggaaatgttgtcaagcaggagcagctaagtcctaagaagaaggagaataatgcacttcttagatacctgctggacagggatgatcctagtgatgcactctctaaagaactacagccccaagtggaaggagtggataataaaatgagtcagtgcaccagctccaccattcctagctcaagtcaagagaaagaccctaaaattaagacagagacaagtgaagagggatctggagacttggataatctagatgctattcttggtgatctgactagttctgacttttacaataattccatatcctcaaatggtagtcatctggggactaagcaacaggtgtttcaaggaactaattctctgggtttgaaaagttcacagtctgtgcagtctattcgtcctccatataaccgagcagtgtctctggatagccctgtttctgttggctcaagtcctccagtaaaaaatatcagtgctttccccatgttaccaaagcaacccatgttgggtgggaatccaagaatgatggatagtcaggaaaattatggctcaagtatgggtgggccaaaccgaaatgtgactgtgactcagactccttcctcaggagactggggcttaccaaactcaaaggccggcagaatggaacctatgaattcaaactccatgggaagaccaggaggagattataatacttctttacccagacctgcactgggtggctctattcccacattgcctcttcggtctaatagcataccaggtgcgagaccagtattgcaacagcagcagcagatgcttcaaatgaggcctggtgaaatccccatgggaatgggggctaatccctatggccaagcagcagcatctaaccaactgggttcctggcccgatggcatgttgtccatggaacaagtttctcatggcactcaaaataggcctcttcttaggaattccctggatgatcttgttgggccaccttccaacctggaaggccagagtgacgaaagagcattattggaccagctgcacactcttctcagcaacacagatgccacaggcctggaagaaattgacagagctttgggcattcctgaacttgtcaatcagggacaggcattagagcccaaacaggatgctttccaaggccaagaagcagcagtaatgatggatcagaaggcaggattatatggacagacatacccagcacaggggcctccaatgcaaggaggctttcatcttcagggacaatcaccatcttttaactctatgatgaatcagatgaaccagcaaggcaattttcctctccaaggaatgcacccacgagccaacatcatgagaccccggacaaacacccccaagcaacttagaatgcagcttcagcagaggctgcagggccagcagtttttgaatcagagccgacaggcacttgaattgaaaatggaaaaccctactgctggtggtgctgcggtgatgaggcctatgatgcagccccaggtgagctcccagcagggttttcttaatgctcaaatggtcgcccaacgcagcagagagctgctaagtcatcacttccgacaacagagggtggctatgatgatgcagcagcagcagcagcagcaacagcagcagcagcagcagcagcagcagcaacagcaacagcaacagcaacagcagcaacagcagcaaacccaggccttcagcccacctcctaatgtgactgcttcccccagcatggatgggcttttggcaggacccacaatgccacaagctcctccgcaacagtttccatatcaaccaaattatggaatgggacaacaaccagatccagcctttggtcgagtgtctagtcctcccaatgcaatgatgtcgtcaagaatgggtccctcccagaatcccatgatgcaacacccgcaggctgcatccatctatcagtcctcagaaatgaagggctggccatcaggaaatttggccaggaacagctccttttcccagcagcagtttgcccaccaggggaatcctgcagtgtatagtatggtgcacatgaatggcagcagtggtcacatgggacagatgaacatgaaccccatgcccatgtctggcatgcctatgggtcctgatcagaaatactgctga

SEQ ID NO: 9624 - protein, 1424 aa, Homo sapiens
MSGLGENLDPLASDSRKRKLPCDTPGQGLTCSGEKRRREQESKYIEELAELISANLSDIDNFNVKPDKCAILKETVRQIRQIKEQGKTISNDDDVQKADVSSTGQGVIDKDSLGPLLLQALDGFLFVVNRDGNIVFVSENVTQYLQYKQEDLVNTSVYNILHEEDRKDFLKNLPKSTVNGVSWTNETQRQKSHTFNCRMLMKTPHDILEDINASPEMRQRYETMQCFALSQPRAMMEEGEDLQSCMICVARRITTGERTFPSNPESFITRHDLSGKVVNIDTNSLRSSMRPGFEDIIRRCIQRFFSLNDGQSWSQKRHYQEAYLNGHAETPVYRFSLADGTIVTAQTKSKLFRNPVTNDRHGFVSTHFLQREQNGYRPNPNPVGQGIRPPMAGCNSSVGGMSMSPNQGLQMPSSRAYGLADPSTTGQMSGARYGGSSNIASLTPGPGMQSPSSYQNNNYGLNMSSPPHGSPGLAPNQQNIMISPRNRGSPKIASHQFSPVAGVHSPMASSGNTGNHSFSSSSLSALQAISEGVGTSLLSTLSSPGPKLDNSPNMNITQPSKVSNQDSKSPLGFYCDQNPVESSMCQSNSRDHLSDKESKESSVEGAENQRGPLESKGHKKLLQLLTCSSDDRGHSSLTNSPLDSSCKESSVSVTSPSGVSSSTSGGVSSTSNMHGSLLQEKHRILHKLLQNGNSPAEVAKITAEATGKDTSSITSCGDGNVVKQEQLSPKKKENNALLRYLLDRDDPSDALSKELQPQVEGVDNKMSQCTSSTIPSSSQEKDPKIKTETSEEGSGDLDNLDAILGDLTSSDFYNNSISSNGSHLGTKQQVFQGTNSLGLKSSQSVQSIRPPYNRAVSLDSPVSVGSSPPVKNISAFPMLPKQPMLGGNPRMMDSQENYGSSMGGPNRNVTVTQTPSSGDWGLPNSKAGRMEPMNSNSMGRPGGDYNTSLPRPALGGSIPTLPLRSNSIPGARPVLQQQQQMLQMRPGEIPMGMGANPYGQAAASNQLGSWPDGMLSMEQVSHGTQNRPLLRNSLDDLVGPPSNLEGQSDERALLDQLHTLLSNTDATGLEEIDRALGIPELVNQGQALEPKQDAFQGQEAAVMMDQKAGLYGQTYPAQGPPMQGGFHLQGQSPSFNSMMNQMNQQGNFPLQGMHPRANIMRPRTNTPKQLRMQLQQRLQGQQFLNQSRQALELKMENPTAGGAAVMRPMMQPQVSSQQGFLNAQMVAQRSRELLSHHFRQQRVAMMMQQQQQQQQQQQQQQQQQQQQQQQQQQQQQTQAFSPPPNVTASPSMDGLLAGPTMPQAPPQQFPYQPNYGMGQQPDPAFGRVSSPPNAMMSSRMGPSQNPMMQHPQAASIYQSSEMKGWPSGNLARNSSFSQQQFAHQGNPAVYSMVHMNGSSGHMGQMNMNPMPMSGMPMGPDQKYC

SEQ ID NO: 9625 - DNA, 1815 bp, Homo sapiens
  CDS (1)..(1815)
atgatggacttggagctgccgccgccgggactcccgtcccagcaggacatggatttgattgacatactttggaggcaagatatagatcttggagtaagtcgagaagtatttgacttcagtcagcgacggaaagagtatgagctggaaaaacagaaaaaacttgaaaaggaaagacaagaacaactccaaaaggagcaagagaaagcctttttcgctcagttacaactagatgaagagacaggtgaatttctcccaattcagccagcccagcacatccagtcagaaaccagtggatctgccaactactcccaggttgcccacattcccaaatcagatgctttgtactttgatgactgcatgcagcttttggcgcagacattcccgtttgtagatgacaatgaggtttcttcggctacgtttcagtcacttgttcctgatattcccggtcacatcgagagcccagtcttcattgctactaatcaggctcagtcacctgaaacttctgttgctcaggtagcccctgttgatttagacggtatgcaacaggacattgagcaagtttgggaggagctattatccattcctgagttacagtgtcttaatattgaaaatgacaagctggttgagactaccatggttccaagtccagaagccaaactgacagaagttgacaattatcatttttactcatctataccctcaatggaaaaagaagtaggtaactgtagtccacattttcttaatgcttttgaggattccttcagcagcatcctctccacagaagaccccaaccagttgacagtgaactcattaaattcagatgccacagtcaacacagattttggtgatgaattttattctgctttcatagctgagcccagtatcagcaacagcatgccctcacctgctactttaagccattcactctctgaacttctaaatgggcccattgatgtttctgatctatcactttgcaaagctttcaaccaaaaccaccctgaaagcacagcagaattcaatgattctgactccggcatttcactaaacacaagtcccagtgtggcatcaccagaacactcagtggaatcttccagctatggagacacactacttggcctcagtgattctgaagtggaagagctagatagtgcccctggaagtgtcaaacagaatggtcctaaaacaccagtacattcttctggggatatggtacaacccttgtcaccatctcaggggcagagcactcacgtgcatgatgcccaatgtgagaacacaccagagaaagaattgcctgtaagtcctggtcatcggaaaaccccattcacaaaagacaaacattcaagccgcttggaggctcatctcacaagagatgaacttagggcaaaagctctccatatcccattccctgtagaaaaaatcattaacctccctgttgttgacttcaacgaaatgatgtccaaagagcagttcaatgaagctcaacttgcattaattcgggatatacgtaggaggggtaagaataaagtggctgctcagaattgcagaaaaagaaaactggaaaatatagtagaactagagcaagatttagatcatttgaaagatgaaaaagaaaaattgctcaaagaaaaaggagaaaatgacaaaagccttcacctactgaaaaaacaactcagcaccttatatctcgaagttttcagcatgctacgtgatgaagatggaaaaccttattctcctagtgaatactccctgcagcaaacaagagatggcaatgttttccttgttcccaaaagtaagaagccagatgttaagaaaaac

SEQ ID NO: 9626 - protein, 605 aa, Homo sapiens
MMDLELPPPGLPSQQDMDLIDILWRQDIDLGVSREVFDFSQRRKEYELEKQKKLEKERQEQLQKEQEKAFFAQLQLDEETGEFLPIQPAQHIQSETSGSANYSQVAHIPKSDALYFDDCMQLLAQTFPFVDDNEVSSATFQSLVPDIPGHIESPVFIATNQAQSPETSVAQVAPVDLDGMQQDIEQVWEELLSIPELQCLNIENDKLVETTMVPSPEAKLTEVDNYHFYSSIPSMEKEVGNCSPHFLNAFEDSFSSILSTEDPNQLTVNSLNSDATVNTDFGDEFYSAFIAEPSISNSMPSPATLSHSLSELLNGPIDVSDLSLCKAFNQNHPESTAEFNDSDSGISLNTSPSVASPEHSVESSSYGDTLLGLSDSEVEELDSAPGSVKQNGPKTPVHSSGDMVQPLSPSQGQSTHVHDAQCENTPEKELPVSPGHRKTPFTKDKHSSRLEAHLTRDELRAKALHIPFPVEKIINLPVVDFNEMMSKEQFNEAQLALIRDIRRRGKNKVAAQNCRKRKLENIVELEQDLDHLKDEKEKLLKEKGENDKSLHLLKKQLSTLYLEVFSMLRDEDGKPYSPSEYSLQQTRDGNVFLVPKSKKPDVKKN

SEQ ID NO: 9627 - DNA, 720 bp, Homo sapiens
  CDS (1)..(720)
atggccacctctggacgcctgagcttcaccgtgcgcagccttctagatttacccgagcaggacgcgcaacacctgccgaggcgggagccagaaccacgcgccccccagcccgacccctgcgccgcctggctggattcggagcgcggccactacccttcctcggacgagagcagcctggagaccagcccgccagactcgtcgcagcggccgtccgctaggcccgcgtctccgggctcggacgccgagaaaaggaagaagcggcgggtgctattctccaaggcgcagacgctggagttggagcggcgcttccggcagcagcggtacctgtctgcgcccgagcgcgagcagctggcgagcctgcttcgcctcacgcccacgcaggtcaagatctggttccagaatcatcgctacaagctgaagcgcgctcgcgctccaggggcggcggagtcgcctgacctggcagcatccgccgagctgcacgccgcgcccggcctgctgcgtcgcgtggtggtgccggtgcttgttcgcgacgggcagccgtgcggcggcggcggcggtggcgaggtgggaaccgccgcggcccaggagaagtgcggcgcccctccagccgccgcctgccctctgccgggctaccctgccttcggtcccggctcggcgcttggcctcttccccgcctaccagcacttagcatcccccgccctggtctcctggaactggtga

SEQ ID NO: 9628 - protein, 239 aa, Homo sapiens
MATSGRLSFTVRSLLDLPEQDAQHLPRREPEPRAPQPDPCAAWLDSERGHYPSSDESSLETSPPDSSQRPSARPASPGSDAEKRKKRRVLFSKAQTLELERRFRQQRYLSAPEREQLASLLRLTPTQVKIWFQNHRYKLKRARAPGAAESPDLAASAELHAAPGLLRRVVVPVLVRDGQPCGGGGGGEVGTAAAQEKCGAPPAAACPLPGYPAFGPGSALGLFPAYQHLASPALVSWNW

SEQ ID NO: 9629 - DNA, 7665 bp, Homo sapiens
  CDS (1)..(7665)
atgccgccgctcctggcgcccctgctctgcctggcgctgctgcccgcgctcgccgcacgaggcccgcgatgctcccagcccggtgagacctgcctgaatggcgggaagtgtgaagcggccaatggcacggaggcctgcgtctgtggcggggccttcgtgggcccgcgatgccaggaccccaacccgtgcctcagcaccccctgcaagaacgccgggacatgccacgtggtggaccgcagaggcgtggcagactatgcctgcagctgtgccctgggcttctctgggcccctctgcctgacacccctggacaatgcctgcctcaccaacccctgccgcaacgggggcacctgcgacctgctcacgctgacggagtacaagtgccgctgcccgcccggctggtcagggaaatcgtgccagcaggctgacccgtgcgcctccaacccctgcgccaacggtggccagtgcctgcccttcgaggcctcctacatctgccactgcccacccagcttccatggccccacctgccggcaggatgtcaacgagtgtggccagaagcccgggctttgccgccacggaggcacctgccacaacgaggtcggctcctaccgctgcgtctgccgcgccacccacactggccccaactgcgagcggccctacgtgccctgcagcccctcgccctgccagaacgggggcacctgccgccccacgggcgacgtcacccacgagtgtgcctgcctgccaggcttcaccggccagaactgtgaggaaaatatcgacgattgtccaggaaacaactgcaagaacgggggtgcctgtgtggacggcgtgaacacctacaactgccgctgcccgccagagtggacaggtcagtactgtaccgaggatgtggacgagtgccagctgatgccaaatgcctgccagaacggcgggacctgccacaacacccacggtggctacaactgcgtgtgtgtcaacggctggactggtgaggactgcagcgagaacattgatgactgtgccagcgccgcctgcttccacggcgccacctgccatgaccgtgtggcctccttctactgcgagtgtccccatggccgcacaggtctgctgtgccacctcaacgacgcatgcatcagcaacccctgtaacgagggctccaactgcgacaccaaccctgtcaatggcaaggccatctgcacctgcccctcggggtacacgggcccggcctgcagccaggacgtggatgagtgctcgctgggtgccaacccctgcgagcatgcgggcaagtgcatcaacacgctgggctccttcgagtgccagtgtctgcagggctacacgggcccccgatgcgagatcgacgtcaacgagtgcgtctcgaacccgtgccagaacgacgccacctgcctggaccagattggggagttccagtgcatctgcatgcccggctacgagggtgtgcactgcgaggtcaacacagacgagtgtgccagcagcccctgcctgcacaatggccgctgcctggacaagatcaatgagttccagtgcgagtgccccacgggcttcactgggcatctgtgccagtacgatgtggacgagtgtgccagcaccccctgcaagaatggtgccaagtgcctggacggacccaacacttacacctgtgtgtgcacggaagggtacacggggacgcactgcgaggtggacatcgatgagtgcgaccccgacccctgccactacggctcctgcaaggacggcgtcgccaccttcacctgcctctgccgcccaggctacacgggccaccactgcgagaccaacatcaacgagtgctccagccagccctgccgccacgggggcacctgccaggaccgcgacaacgcctacctctgcttctgcctgaaggggaccacaggacccaactgcgagatcaacctggatgactgtgccagcagcccctgcgactcgggcacctgtctggacaagatcgatggctacgagtgtgcctgtgagccgggctacacagggagcatgtgtaacatcaacatcgatgagtgtgcgggcaacccctgccacaacgggggcacctgcgaggacggcatcaatggcttcacctgccgctgccccgagggctaccacgaccccacctgcctgtctgaggtcaatgagtgcaacagcaacccctgcgtccacggggcctgccgggacagcctcaacgggtacaagtgcgactgtgaccctgggtggagtgggaccaactgtgacatcaacaacaatgagtgtgaatccaacccttgtgtcaacggcggcacctgcaaagacatgaccagtggctacgtgtgcacctgccgggagggcttcagcggtcccaactgccagaccaacatcaacgagtgtgcgtccaacccatgtctgaaccagggcacgtgtattgacgacgttgccgggtacaagtgcaactgcctgctgccctacacaggtgccacgtgtgaggtggtgctggccccgtgtgcccccagcccctgcagaaacggcggggagtgcaggcaatccgaggactatgagagcttctcctgtgtctgccccacgggctggcaagggcagacctgtgaggtcgacatcaacgagtgcgttctgagcccgtgccggcacggcgcatcctgccagaacacccacggcggctaccgctgccactgccaggccggctacagtgggcgcaactgcgagaccgacatcgacgactgccggcccaacccgtgtcacaacgggggctcctgcacagacggcatcaacacggccttctgcgactgcctgcccggcttccggggcactttctgtgaggaggacatcaacgagtgtgccagtgacccctgccgcaacggggccaactgcacggactgcgtggacagctacacgtgcacctgccccgcaggcttcagcgggatccactgtgagaacaacacgcctgactgcacagagagctcctgcttcaacggtggcacctgcgtggacggcatcaactcgttcacctgcctgtgtccacccggcttcacgggcagctactgccagcacgatgtcaatgagtgcgactcacagccctgcctgcatggcggcacctgtcaggacggctgcggctcctacaggtgcacctgcccccagggctacactggccccaactgccagaaccttgtgcactggtgtgactcctcgccctgcaagaacggcggcaaatgctggcagacccacacccagtaccgctgcgagtgccccagcggctggaccggcctttactgcgacgtgcccagcgtgtcctgtgaggtggctgcgcagcgacaaggtgttgacgttgcccgcctgtgccagcatggagggctctgtgtggacgcgggcaacacgcaccactgccgctgccaggcgggctacacaggcagctactgtgaggacctggtggacgagtgctcacccagcccctgccagaacggggccacctgcacggactacctgggcggctactcctgcaagtgcgtggccggctaccacggggtgaactgctctgaggagatcgacgagtgcctctcccacccctgccagaacgggggcacctgcctcgacctccccaacacctacaagtgctcctgcccacggggcactcagggtgtgcactgtgagatcaacgtggacgactgcaatccccccgttgaccccgtgtcccggagccccaagtgctttaacaacggcacctgcgtggaccaggtgggcggctacagctgcacctgcccgccgggcttcgtgggtgagcgctgtgagggggatgtcaacgagtgcctgtccaatccctgcgacgcccgtggcacccagaactgcgtgcagcgcgtcaatgacttccactgcgagtgccgtgctggtcacaccgggcgccgctgcgagtccgtcatcaatggctgcaaaggcaagccctgcaagaatgggggcacctgcgccgtggcctccaacaccgcccgcgggttcatctgcaagtgccctgcgggcttcgagggcgccacgtgtgagaatgacgctcgtacctgcggcagcctgcgctgcctcaacggcggcacatgcatctccggcccgcgcagccccacctgcctgtgcctgggccccttcacgggccccgaatgccagttcccggccagcagcccctgcctgggcggcaacccctgctacaaccaggggacctgtgagcccacatccgagagccccttctaccgttgcctgtgccccgccaaattcaacgggctcttgtgccacatcctggactacagcttcgggggtggggccgggcgcgacatccccccgccgctgatcgaggaggcgtgcgagctgcccgagtgccaggaggacgcgggcaacaaggtctgcagcctgcagtgcaacaaccacgcgtgcggctgggacggcggtgactgctccctcaacttcaatgacccctggaagaactgcacgcagtctctgcagtgctggaagtacttcagtgacggccactgtgacagccagtgcaactcagccggctgcctcttcgacggctttgactgccagcgtgcggaaggccagtgcaaccccctgtacgaccagtactgcaaggaccacttcagcgacgggcactgcgaccagggctgcaacagcgcggagtgcgagtgggacgggctggactgtgcggagcatgtacccgagaggctggcggccggcacgctggtggtggtggtgctgatgccgccggagcagctgcgcaacagctccttccacttcctgcgggagctcagccgcgtgctgcacaccaacgtggtcttcaagcgtgacgcacacggccagcagatgatcttcccctactacggccgcgaggaggagctgcgcaagcaccccatcaagcgtgccgccgagggctgggccgcacctgacgccctgctgggccaggtgaaggcctcgctgctccctggtggcagcgagggtgggcggcggcggagggagctggaccccatggacgtccgcggctccatcgtctacctggagattgacaaccggcagtgtgtgcaggcctcctcgcagtgcttccagagtgccaccgacgtggccgcattcctgggagcgctcgcctcgctgggcagcctcaacatcccctacaagatcgaggccgtgcagagtgagaccgtggagccgcccccgccggcgcagctgcacttcatgtacgtggcggcggccgcctttgtgcttctgttcttcgtgggctgcggggtgctgctgtcccgcaagcgccggcggcagcatggccagctctggttccctgagggcttcaaagtgtctgaggccagcaagaagaagcggcgggagcccctcggcgaggactccgtgggcctcaagcccctgaagaacgcttcagacggtgccctcatggacgacaaccagaatgagtggggggacgaggacctggagaccaagaagttccggttcgaggagcccgtggttctgcctgacctggacgaccagacagaccaccggcagtggactcagcagcacctggatgccgctgacctgcgcatgtctgccatggcccccacaccgccccagggtgaggttgacgccgactgcatggacgtcaatgtccgcgggcctgatggcttcaccccgctcatgatcgcctcctgcagcgggggcggcctggagacgggcaacagcgaggaagaggaggacgcgccggccgtcatctccgacttcatctaccagggcgccagcctgcacaaccagacagaccgcacgggcgagaccgccttgcacctggccgcccgctactcacgctctgatgccgccaagcgcctgctggaggccagcgcagatgccaacatccaggacaacatgggccgcaccccgctgcatgcggctgtgtctgccgacgcacaaggtgtcttccagatcctgatccggaaccgagccacagacctggatgcccgcatgcatgatggcacgacgccactgatcctggctgcccgcctggccgtggagggcatgctggaggacctcatcaactcacacgccgacgtcaacgccgtagatgacctgggcaagtccgccctgcactgggccgccgccgtgaacaatgtggatgccgcagttgtgctcctgaagaacggggctaacaaagatatgcagaacaacagggaggagacacccctgtttctggccgcccgggagggcagctacgagaccgccaaggtgctgctggaccactttgccaaccgggacatcacggatcatatggaccgcctgccgcgcgacatcgcacaggagcgcatgcatcacgacatcgtgaggctgctggacgagtacaacctggtgcgcagcccgcagctgcacggagccccgctggggggcacgcccaccctgtcgcccccgctctgctcgcccaacggctacctgggcagcctcaagcccggcgtgcagggcaagaaggtccgcaagcccagcagcaaaggcctggcctgtggaagcaaggaggccaaggacctcaaggcacggaggaagaagtcccaggacggcaagggctgcctgctggacagctccggcatgctctcgcccgtggactccctggagtcaccccatggctacctgtcagacgtggcctcgccgccactgctgccctccccgttccagcagtctccgtccgtgcccctcaaccacctgcctgggatgcccgacacccacctgggcatcgggcacctgaacgtggcggccaagcccgagatggcggcgctgggtgggggcggccggctggcctttgagactggcccacctcgtctctcccacctgcctgtggcctctggcaccagcaccgtcctgggctccagcagcggaggggccctgaatttcactgtgggcgggtccaccagtttgaatggtcaatgcgagtggctgtcccggctgcagagcggcatggtgccgaaccaatacaaccctctgcgggggagtgtggcaccaggccccctgagcacacaggccccctccctgcagcatggcatggtaggcccgctgcacagtagccttgctgccagcgccctgtcccagatgatgagctaccagggcctgcccagcacccggctggccacccagcctcacctggtgcagacccagcaggtgcagccacaaaacttacagatgcagcagcagaacctgcagccagcaaacatccagcagcagcaaagcctgcagccgccaccaccaccaccacagccgcaccttggcgtgagctcagcagccagcggccacctgggccggagcttcctgagtggagagccgagccaggcagacgtgcagccactgggccccagcagcctggcggtgcacactattctgccccaggagagccccgccctgcccacgtcgctgccatcctcgctggtcccacccgtgaccgcagcccagttcctgacgcccccctcgcagcacagctactcctcgcctgtggacaacacccccagccaccagctacaggtgcctgagcaccccttcctcaccccgtcccctgagtcccctgaccagtggtccagctcgtccccgcattccaacgtctccgactggtccgagggcgtctccagccctcccaccagcatgcagtcccagatcgcccgcattccggaggccttcaag

SEQ ID NO: 9630 - protein, 2555 aa, Homo sapiens
MPPLLAPLLCLALLPALAARGPRCSQPGETCLNGGKCEAANGTEACVCGGAFVGPRCQDPNPCLSTPCKNAGTCHVVDRRGVADYACSCALGFSGPLCLTPLDNACLTNPCRNGGTCDLLTLTEYKCRCPPGWSGKSCQQADPCASNPCANGGQCLPFEASYICHCPPSFHGPTCRQDVNECGQKPGLCRHGGTCHNEVGSYRCVCRATHTGPNCERPYVPCSPSPCQNGGTCRPTGDVTHECACLPGFTGQNCEENIDDCPGNNCKNGGACVDGVNTYNCRCPPEWTGQYCTEDVDECQLMPNACQNGGTCHNTHGGYNCVCVNGWTGEDCSENIDDCASAACFHGATCHDRVASFYCECPHGRTGLLCHLNDACISNPCNEGSNCDTNPVNGKAICTCPSGYTGPACSQDVDECSLGANPCEHAGKCINTLGSFECQCLQGYTGPRCEIDVNECVSNPCQNDATCLDQIGEFQCICMPGYEGVHCEVNTDECASSPCLHNGRCLDKINEFQCECPTGFTGHLCQYDVDECASTPCKNGAKCLDGPNTYTCVCTEGYTGTHCEVDIDECDPDPCHYGSCKDGVATFTCLCRPGYTGHHCETNINECSSQPCRHGGTCQDRDNAYLCFCLKGTTGPNCEINLDDCASSPCDSGTCLDKIDGYECACEPGYTGSMCNINIDECAGNPCHNGGTCEDGINGFTCRCPEGYHDPTCLSEVNECNSNPCVHGACRDSLNGYKCDCDPGWSGTNCDINNNECESNPCVNGGTCKDMTSGYVCTCREGFSGPNCQTNINECASNPCLNQGTCIDDVAGYKCNCLLPYTGATCEVVLAPCAPSPCRNGGECRQSEDYESFSCVCPTGWQGQTCEVDINECVLSPCRHGASCQNTHGGYRCHCQAGYSGRNCETDIDDCRPNPCHNGGSCTDGINTAFCDCLPGFRGTFCEEDINECASDPCRNGANCTDCVDSYTCTCPAGFSGIHCENNTPDCTESSCFNGGTCVDGINSFTCLCPPGFTGSYCQHDVNECDSQPCLHGGTCQDGCGSYRCTCPQGYTGPNCQNLVHWCDSSPCKNGGKCWQTHTQYRCECPSGWTGLYCDVPSVSCEVAAQRQGVDVARLCQHGGLCVDAGNTHHCRCQAGYTGSYCEDLVDECSPSPCQNGATCTDYLGGYSCKCVAGYHGVNCSEEIDECLSHPCQNGGTCLDLPNTYKCSCPRGTQGVHCEINVDDCNPPVDPVSRSPKCFNNGTCVDQVGGYSCTCPPGFVGERCEGDVNECLSNPCDARGTQNCVQRVNDFHCECRAGHTGRRCESVINGCKGKPCKNGGTCAVASNTARGFICKCPAGFEGATCENDARTCGSLRCLNGGTCISGPRSPTCLCLGPFTGPECQFPASSPCLGGNPCYNQGTCEPTSESPFYRCLCPAKFNGLLCHILDYSFGGGAGRDIPPPLIEEACELPECQEDAGNKVCSLQCNNHACGWDGGDCSLNFNDPWKNCTQSLQCWKYFSDGHCDSQCNSAGCLFDGFDCQRAEGQCNPLYDQYCKDHFSDGHCDQGCNSAECEWDGLDCAEHVPERLAAGTLVVVVLMPPEQLRNSSFHFLRELSRVLHTNVVFKRDAHGQQMIFPYYGREEELRKHPIKRAAEGWAAPDALLGQVKASLLPGGSEGGRRRRELDPMDVRGSIVYLEIDNRQCVQASSQCFQSATDVAAFLGALASLGSLNIPYKIEAVQSETVEPPPPAQLHFMYVAAAAFVLLFFVGCGVLLSRKRRRQHGQLWFPEGFKVSEASKKKRREPLGEDSVGLKPLKNASDGALMDDNQNEWGDEDLETKKFRFEEPVVLPDLDDQTDHRQWTQQHLDAADLRMSAMAPTPPQGEVDADCMDVNVRGPDGFTPLMIASCSGGGLETGNSEEEEDAPAVISDFIYQGASLHNQTDRTGETALHLAARYSRSDAAKRLLEASADANIQDNMGRTPLHAAVSADAQGVFQILIRNRATDLDARMHDGTTPLILAARLAVEGMLEDLINSHADVNAVDDLGKSALHWAAAVNNVDAAVVLLKNGANKDMQNNREETPLFLAAREGSYETAKVLLDHFANRDITDHMDRLPRDIAQERMHHDIVRLLDEYNLVRSPQLHGAPLGGTPTLSPPLCSPNGYLGSLKPGVQGKKVRKPSSKGLACGSKEAKDLKARRKKSQDGKGCLLDSSGMLSPVDSLESPHGYLSDVASPPLLPSPFQQSPSVPLNHLPGMPDTHLGIGHLNVAAKPEMAALGGGGRLAFETGPPRLSHLPVASGTSTVLGSSSGGALNFTVGGSTSLNGQCEWLSRLQSGMVPNQYNPLRGSVAPGPLSTQAPSLQHGMVGPLHSSLAASALSQMMSYQGLPSTRLATQPHLVQTQQVQPQNLQMQQQNLQPANIQQQQSLQPPPPPPQPHLGVSSAASGHLGRSFLSGEPSQADVQPLGPSSLAVHTILPQESPALPTSLPSSLVPPVTAAQFLTPPSQHSYSSPVDNTPSHQLQVPEHPFLTPSPESPDQWSSSSPHSNVSDWSEGVSSPPTSMQSQIARIPEAFK

SEQ ID NO: 9631 - DNA, 570 bp, Homo sapiens
  CDS (1)..(570)
atgactgagtacaaactggtggtggttggagcaggtggtgttgggaaaagcgcactgacaatccagctaatccagaaccactttgtagatgaatatgatcccaccatagaggattcttacagaaaacaagtggttatagatggtgaaacctgtttgttggacatactggatacagctggacaagaagagtacagtgccatgagagaccaatacatgaggacaggcgaaggcttcctctgtgtatttgccatcaataatagcaagtcatttgcggatattaacctctacagggagcagattaagcgagtaaaagactcggatgatgtacctatggtgctagtgggaaacaagtgtgatttgccaacaaggacagttgatacaaaacaagcccacgaactggccaagagttacgggattccattcattgaaacctcagccaagaccagacagggtgttgaagatgctttttacacactggtaagagaaatacgccagtaccgaatgaaaaaactcaacagcagtgatgatgggactcagggttgtatgggattgccatgtgtggtgatgtaa

SEQ ID NO: 9632 - protein, 189 aa, Homo sapiens
MTEYKLVVVGAGGVGKSALTIQLIQNHFVDEYDPTIEDSYRKQVVIDGETCLLDILDTAGQEEYSAMRDQYMRTGEGFLCVFAINNSKSFADINLYREQIKRVKDSDDVPMVLVGNKCDLPTRTVDTKQAHELAKSYGIPFIETSAKTRQGVEDAFYTLVREIRQYRMKKLNSSDDGTQGCMGLPCVVM

SEQ ID NO: 9633 - DNA, 276 bp, Artificial Sequence
  Synthetic dominant negative of Myc
  CDS (1)..(276)
cccgggaccgagaatgtcaagaggcgaacacacaacgtcttggagcgccagaggaggaacgagctaaaacggagcttttttgccctgcgtgaccagatcccggagttggaaaacaatgaaaaggcccccaaggtagttatccttaaaaaagccacagcatacatcctgtccgtccaagcagagacgcaaaagctcatttctgaaatcgacttgttgcggaaacaaaacgaacagttgaaacacaaacttgaacagctacggaactcttgtgcgtaa

SEQ ID NO: 9634 - protein, 91 aa, Artificial Sequence
  Synthetic Construct
PGTENVKRRTHNVLERQRRNELKRSFFALRDQIPELENNEKAPKVVILKKATAYILSVQAETQKLISEIDLLRKQNEQLKHKLEQLRNSCA

SEQ ID NO: 9635 - DNA, 3204 bp, Homo sapiens
  CDS (1)..(3204)
atgcctccacgaccatcatcaggtgaactgtggggcatccacttgatgcccccaagaatcctagtagaatgtttactaccaaatggaatgatagtgactttagaatgcctccgtgaggctacattaataaccataaagcatgaactatttaaagaagcaagaaaataccccctccatcaacttcttcaagatgaatcttcttacattttcgtaagtgttactcaagaagcagaaagggaagaattttttgatgaaacaagacgactttgtgaccttcggctttttcaaccctttttaaaagtaattgaaccagtaggcaaccgtgaagaaaagatcctcaatcgagaaattggttttgctatcggcatgccagtgtgtgaatttgatatggttaaagatccagaagtacaggacttccgaagaaatattctgaacgtttgtaaagaagctgtggatcttagggacctcaattcacctcatagtagagcaatgtatgtctatcctccaaatgtagaatcttcaccagaattgccaaagcacatatataataaattagataaagggcaaataatagtggtgatctgggtaatagtttctccaaataatgacaagcagaagtatactctgaaaatcaaccatgactgtgtaccagaacaagtaattgctgaagcaatcaggaaaaaaactcgaagtatgttgctatcctctgaacaactaaaactctgtgttttagaatatcagggcaagtatattttaaaagtgtgtggatgtgatgaatacttcctagaaaaatatcctctgagtcagtataagtatataagaagctgtataatgcttgggaggatgcccaatttgatgttgatggctaaagaaagcctttattctcaactgccaatggactgttttacaatgccatcttattccagacgcatttccacagctacaccatatatgaatggagaaacatctacaaaatccctttgggttataaatagtgcactcagaataaaaattctttgtgcaacctacgtgaatgtaaatattcgagacattgataagatctatgttcgaacaggtatctaccatggaggagaacccttatgtgacaatgtgaacactcaaagagtaccttgttccaatcccaggtggaatgaatggctgaattatgatatatacattcctgatcttcctcgtgctgctcgactttgcctttccatttgctctgttaaaggccgaaagggtgctaaagaggaacactgtccattggcatggggaaatataaacttgtttgattacacagacactctagtatctggaaaaatggctttgaatctttggccagtacctcatggattagaagatttgctgaaccctattggtgttactggatcaaatccaaataaagaaactccatgcttagagttggagtttgactggttcagcagtgtggtaaagttcccagatatgtcagtgattgaagagcatgccaattggtctgtatcccgagaagcaggatttagctattcccacgcaggactgagtaacagactagctagagacaatgaattaagggaaaatgacaaagaacagctcaaagcaatttctacacgagatcctctctctgaaatcactgagcaggagaaagattttctatggagtcacagacactattgtgtaactatccccgaaattctacccaaattgcttctgtctgttaaatggaattctagagatgaagtagcccagatgtattgcttggtaaaagattggcctccaatcaaacctgaacaggctatggaacttctggactgtaattacccagatcctatggttcgaggttttgctgttcggtgcttggaaaaatatttaacagatgacaaactttctcagtatttaattcagctagtacaggtcctaaaatatgaacaatatttggataacttgcttgtgagatttttactgaagaaagcattgactaatcaaaggattgggcactttttcttttggcatttaaaatctgagatgcacaataaaacagttagccagaggtttggcctgcttttggagtcctattgtcgtgcatgtgggatgtatttgaagcacctgaataggcaagtcgaggcaatggaaaagctcattaacttaactgacattctcaaacaggagaagaaggatgaaacacaaaaggtacagatgaagtttttagttgagcaaatgaggcgaccagatttcatggatgctctacagggctttctgtctcctctaaaccctgctcatcaactaggaaacctcaggcttgaagagtgtcgaattatgtcctctgcaaaaaggccactgtggttgaattgggagaacccagacatcatgtcagagttactgtttcagaacaatgagatcatctttaaaaatggggatgatttacggcaagatatgctaacacttcaaattattcgtattatggaaaatatctggcaaaatcaaggtcttgatcttcgaatgttaccttatggttgtctgtcaatcggtgactgtgtgggacttattgaggtggtgcgaaattctcacactattatgcaaattcagtgcaaaggcggcttgaaaggtgcactgcagttcaacagccacacactacatcagtggctcaaagacaagaacaaaggagaaatatatgatgcagccattgacctgtttacacgttcatgtgctggatactgtgtagctaccttcattttgggaattggagatcgtcacaatagtaacatcatggtgaaagacgatggacaactgtttcatatagattttggacactttttggatcacaagaagaaaaaatttggttataaacgagaacgtgtgccatttgttttgacacaggatttcttaatagtgattagtaaaggagcccaagaatgcacaaagacaagagaatttgagaggtttcaggagatgtgttacaaggcttatctagctattcgacagcatgccaatctcttcataaatcttttctcaatgatgcttggctctggaatgccagaactacaatcttttgatgacattgcatacattcgaaagaccctagccttagataaaactgagcaagaggctttggagtatttcatgaaacaaatgaatgatgcacatcatggtggctggacaacaaaaatggattggatcttccacacaattaaacagcatgcattgaac

SEQ ID NO: 9636 - protein, 1068 aa, Homo sapiens
MPPRPSSGELWGIHLMPPRILVECLLPNGMIVTLECLREATLITIKHELFKEARKYPLHQLLQDESSYIFVSVTQEAEREEFFDETRRLCDLRLFQPFLKVIEPVGNREEKILNREIGFAIGMPVCEFDMVKDPEVQDFRRNILNVCKEAVDLRDLNSPHSRAMYVYPPNVESSPELPKHIYNKLDKGQIIVVIWVIVSPNNDKQKYTLKINHDCVPEQVIAEAIRKKTRSMLLSSEQLKLCVLEYQGKYILKVCGCDEYFLEKYPLSQYKYIRSCIMLGRMPNLMLMAKESLYSQLPMDCFTMPSYSRRISTATPYMNGETSTKSLWVINSALRIKILCATYVNVNIRDIDKIYVRTGIYHGGEPLCDNVNTQRVPCSNPRWNEWLNYDIYIPDLPRAARLCLSICSVKGRKGAKEEHCPLAWGNINLFDYTDTLVSGKMALNLWPVPHGLEDLLNPIGVTGSNPNKETPCLELEFDWFSSVVKFPDMSVIEEHANWSVSREAGFSYSHAGLSNRLARDNELRENDKEQLKAISTRDPLSEITEQEKDFLWSHRHYCVTIPEILPKLLLSVKWNSRDEVAQMYCLVKDWPPIKPEQAMELLDCNYPDPMVRGFAVRCLEKYLTDDKLSQYLIQLVQVLKYEQYLDNLLVRFLLKKALTNQRIGHFFFWHLKSEMHNKTVSQRFGLLLESYCRACGMYLKHLNRQVEAMEKLINLTDILKQEKKDETQKVQMKFLVEQMRRPDFMDALQGFLSPLNPAHQLGNLRLEECRIMSSAKRPLWLNWENPDIMSELLFQNNEIIFKNGDDLRQDMLTLQIIRIMENIWQNQGLDLRMLPYGCLSIGDCVGLIEVVRNSHTIMQIQCKGGLKGALQFNSHTLHQWLKDKNKGEIYDAAIDLFTRSCAGYCVATFILGIGDRHNSNIMVKDDGQLFHIDFGHFLDHKKKKFGYKRERVPFVLTQDFLIVISKGAQECTKTREFERFQEMCYKAYLAIRQHANLFINLFSMMLGSGMPELQSFDDIAYIRKTLALDKTEQEALEYFMKQMNDAHHGGWTTKMDWIFHTIKQHALN

SEQ ID NO: 9637 - DNA, 2172 bp, Homo sapiens
  CDS (1)..(2172)
atgagtgctgaggggtaccagtacagagcgctgtatgattataaaaaggaaagagaagaagatattgacttgcacttgggtgacatattgactgtgaataaagggtccttagtagctcttggattcagtgatggacaggaagccaggcctgaagaaattggctggttaaatggctataatgaaaccacaggggaaaggggggactttccgggaacttacgtagaatatattggaaggaaaaaaatctcgcctcccacaccaaagccccggccacctcggcctcttcctgttgcaccaggttcttcgaaaactgaagcagatgttgaacaacaagctttgactctcccggatcttgcagagcagtttgcccctcctgacattgccccgcctcttcttatcaagctcgtggaagccattgaaaagaaaggtctggaatgttcaactctatacagaacacagagctccagcaacctggcagaattacgacagcttcttgattgtgatacaccctccgtggacttggaaatgatcgatgtgcacgttttggctgacgctttcaaacgctatctcctggacttaccaaatcctgtcattccagcagccgtttacagtgaaatgatttctttagctccagaagtacaaagctccgaagaatatattcagctattgaagaagcttattaggtcgcctagcatacctcatcagtattggcttacgcttcagtatttgttaaaacatttcttcaagctctctcaaacctccagcaaaaatctgttgaatgcaagagtactctctgaaattttcagccctatgcttttcagattctcagcagccagctctgataatactgaaaacctcataaaagttatagaaattttaatctcaactgaatggaatgaacgacagcctgcaccagcactgcctcctaaaccaccaaaacctactactgtagccaacaacggtatgaataacaatatgtccttacaagatgctgaatggtactggggagatatctcgagggaagaagtgaatgaaaaacttcgagatacagcagacgggacctttttggtacgagatgcgtctactaaaatgcatggtgattatactcttacactaaggaaagggggaaataacaaattaatcaaaatatttcatcgagatgggaaatatggcttctctgacccattaaccttcagttctgtggttgaattaataaaccactaccggaatgaatctctagctcagtataatcccaaattggatgtgaaattactttatccagtatccaaataccaacaggatcaagttgtcaaagaagataatattgaagctgtagggaaaaaattacatgaatataacactcagtttcaagaaaaaagtcgagaatatgatagattatatgaagaatatacccgcacatcccaggaaatccaaatgaaaaggacagctattgaagcatttaatgaaaccataaaaatatttgaagaacagtgccagacccaagagcggtacagcaaagaatacatagaaaagtttaaacgtgaaggcaatgagaaagaaatacaaaggattatgcataattatgataagttgaagtctcgaatcagtgaaattattgacagtagaagaagattggaagaagacttgaagaagcaggcagctgagtatcgagaaattgacaaacgtatgaacagcattaaaccagaccttatccagctgagaaagacgagagaccaatacttgatgtggttgactcaaaaaggtgttcggcaaaagaagttgaacgagtggttgggcaatgaaaacactgaagaccaatattcactggtggaagatgatgaagatttgccccatcatgatgagaagacatggaatgttggaagcagcaaccgaaacaaagctgaaaacctgttgcgagggaagcgagatggcacttttcttgtccgggagagcagtaaacagggctgctatgcctgctctgtagtggtggacggcgaagtaaagcattgtgtcataaacaaaacagcaactggctatggctttgccgagccctataacttgtacagctctctgaaagaactggtgctacattaccaacacacctcccttgtgcagcacaacgactccctcaatgtcacactagcctacccagtatatgcacagcagaggcga

SEQ ID NO: 9638 - protein, 724 aa, Homo sapiens
MSAEGYQYRALYDYKKEREEDIDLHLGDILTVNKGSLVALGFSDGQEARPEEIGWLNGYNETTGERGDFPGTYVEYIGRKKISPPTPKPRPPRPLPVAPGSSKTEADVEQQALTLPDLAEQFAPPDIAPPLLIKLVEAIEKKGLECSTLYRTQSSSNLAELRQLLDCDTPSVDLEMIDVHVLADAFKRYLLDLPNPVIPAAVYSEMISLAPEVQSSEEYIQLLKKLIRSPSIPHQYWLTLQYLLKHFFKLSQTSSKNLLNARVLSEIFSPMLFRFSAASSDNTENLIKVIEILISTEWNERQPAPALPPKPPKPTTVANNGMNNNMSLQDAEWYWGDISREEVNEKLRDTADGTFLVRDASTKMHGDYTLTLRKGGNNKLIKIFHRDGKYGFSDPLTFSSVVELINHYRNESLAQYNPKLDVKLLYPVSKYQQDQVVKEDNIEAVGKKLHEYNTQFQEKSREYDRLYEEYTRTSQEIQMKRTAIEAFNETIKIFEEQCQTQERYSKEYIEKFKREGNEKEIQRIMHNYDKLKSRISEIIDSRRRLEEDLKKQAAEYREIDKRMNSIKPDLIQLRKTRDQYLMWLTQKGVRQKKLNEWLGNENTEDQYSLVEDDEDLPHHDEKTWNVGSSNRNKAENLLRGKRDGTFLVRESSKQGCYACSVVVDGEVKHCVINKTATGYGFAEPYNLYSSLKELVLHYQHTSLVQHNDSLNVTLAYPVYAQQRR

SEQ ID NO: 9639 - DNA, 1767 bp, Homo sapiens
  CDS (1)..(1767)
atggcggcggccgacggcgacgactcgctgtaccccatcgcggtgctcatagacgaactccgcaatgaggacgttcagcttcgcctcaacagcatcaagaagctgtccaccatcgccttggcccttggggttgaaaggacccgaagtgagcttctgcctttccttacagataccatctatgatgaagatgaggtcctcctggccctggcagaacagctgggaaccttcactaccctggtgggaggcccagagtacgtgcactgcctgctgccaccgctggagtcgctggccacagtggaggagacagtggtgcgggacaaggcagtggagtccttacgggccatctcacacgagcactcgccctctgacctggaggcgcactttgtgccgctagtgaagcggctggcgggcggcgactggttcacctcccgcacctcggcctgcggcctcttctccgtctgctacccccgagtgtccagtgctgtgaaggcggaacttcgacagtacttccggaacctgtgctcagatgacacccccatggtgcggcgggccgcagcctccaagctgggggagtttgccaaggtgctggagctggacaacgtcaagagtgagatcatccccatgttctccaacctggcctctgacgagcaggactcggtgcggctgctggcggtggaggcgtgcgtgaacatcgcccagcttctgccccaggaggatctggaggccctggtgatgcccactctgcgccaggccgctgaagacaagtcctggcgcgtccgctacatggtggctgacaagttcacagagctccagaaagcagtggggcctgagatcaccaagacagacctggtccctgccttccagaacctgatgaaagactgtgaggccgaggtgagggccgcagcctcccacaaggtcaaagagttctgtgaaaacctctcagctgactgtcgggagaatgtgatcatgtcccagatcttgccctgcatcaaggagctggtgtccgatgccaaccaacatgtcaagtctgccctggcctcagtcatcatgggtctctctcccatcttgggcaaagacaacaccatcgagcacctcttgcccctcttcctggctcagctgaaggatgagtgccctgaggtacggctgaacatcatctctaacctggactgtgtgaacgaggtgattggcatccggcagctgtcccagtccctgctccctgccattgtggagctggctgaggacgccaagtggcgggtgcggctggccatcattgagtacatgcccctcctggctggacagctgggagtggagttctttgatgagaaacttaactccttgtgcatggcctggcttgtggatcatgtatatgccatccgcgaggcagccaccagcaacctgaagaagctagtggaaaagtttgggaaggagtgggcccatgccacaatcatccccaaggtcttggccatgtccggagaccccaactacctgcaccgcatgactacgctcttctgcatcaatgtgctgtctgaggtctgtgggcaggacatcaccaccaagcacatgctacccacggttctgcgcatggctggggacccggttgccaatgtccgcttcaatgtggccaagtctctgcagaagatagggcccatcctggacaacagcaccttgcagagtgaagtcaagcccatcctagagaagctgacccaggaccaggatgtggacgtcaaatactttgcccaggaggctctgactgttctgtctctcgcc

SEQ ID NO: 9640 - protein, 589 aa, Homo sapiens
MAAADGDDSLYPIAVLIDELRNEDVQLRLNSIKKLSTIALALGVERTRSELLPFLTDTIYDEDEVLLALAEQLGTFTTLVGGPEYVHCLLPPLESLATVEETVVRDKAVESLRAISHEHSPSDLEAHFVPLVKRLAGGDWFTSRTSACGLFSVCYPRVSSAVKAELRQYFRNLCSDDTPMVRRAAASKLGEFAKVLELDNVKSEIIPMFSNLASDEQDSVRLLAVEACVNIAQLLPQEDLEALVMPTLRQAAEDKSWRVRYMVADKFTELQKAVGPEITKTDLVPAFQNLMKDCEAEVRAAASHKVKEFCENLSADCRENVIMSQILPCIKELVSDANQHVKSALASVIMGLSPILGKDNTIEHLLPLFLAQLKDECPEVRLNIISNLDCVNEVIGIRQLSQSLLPAIVELAEDAKWRVRLAIIEYMPLLAGQLGVEFFDEKLNSLCMAWLVDHVYAIREAATSNLKKLVEKFGKEWAHATIIPKVLAMSGDPNYLHRMTTLFCINVLSEVCGQDITTKHMLPTVLRMAGDPVANVRFNVAKSLQKIGPILDNSTLQSEVKPILEKLTQDQDVDVKYFAQEALTVLSLA

SEQ ID NO: 9641 - DNA, 1779 bp, Homo sapiens
  CDS (1)..(1779)
atgacatcgcggagatggtttcacccaaatatcactggtgtggaggcagaaaacctactgttgacaagaggagttgatggcagttttttggcaaggcctagtaaaagtaaccctggagacttcacactttccgttagaagaaatggagctgtcacccacatcaagattcagaacactggtgattactatgacctgtatggaggggagaaatttgccactttggctgagttggtccagtattacatggaacatcacgggcaattaaaagagaagaatggagatgtcattgagcttaaatatcctctgaactgtgcagatcctacctctgaaaggtggtttcatggacatctctctgggaaagaagcagagaaattattaactgaaaaaggaaaacatggtagttttcttgtacgagagagccagagccaccctggagattttgttctttctgtgcgcactggtgatgacaaaggggagagcaatgacggcaagtctaaagtgacccatgttatgattcgctgtcaggaactgaaatacgacgttggtggaggagaacggtttgattctttgacagatcttgtggaacattataagaagaatcctatggtggaaacattgggtacagtactacaactcaagcagccccttaacacgactcgtataaatgctgctgaaatagaaagcagagttcgagaactaagcaaattagctgagaccacagataaagtcaaacaaggcttttgggaagaatttgagacactacaacaacaggagtgcaaacttctctacagccgaaaagagggtcaaaggcaagaaaacaaaaacaaaaatagatataaaaacatcctgccctttgatcataccagggttgtcctacacgatggtgatcccaatgagcctgtttcagattacatcaatgcaaatatcatcatgcctgaatttgaaaccaagtgcaacaattcaaagcccaaaaagagttacattgccacacaaggctgcctgcaaaacacggtgaatgacttttggcggatggtgttccaagaaaactcccgagtgattgtcatgacaacgaaagaagtggagagaggaaagagtaaatgtgtcaaatactggcctgatgagtatgctctaaaagaatatggcgtcatgcgtgttaggaacgtcaaagaaagcgccgctcatgactatacgctaagagaacttaaactttcaaaggttggacaagggaatacggagagaacggtctggcaataccactttcggacctggccggaccacggcgtgcccagcgaccctgggggcgtgctggacttcctggaggaggtgcaccataagcaggagagcatcatggatgcagggccggtcgtggtgcactgcagtgctggaattggccggacagggacgttcattgtgattgatattcttattgacatcatcagagagaaaggtgttgactgcgatattgacgttcccaaaaccatccagatggtgcggtctcagaggtcagggatggtccagacagaagcacagtaccgatttatctatatggcggtccagcattatattgaaacactacagcgcaggattgaagaagagcagaaaagcaagaggaaagggcacgaatatacaaatattaagtattctctagcggaccagacgagtggagatcagagccctctcccgccttgtactccaacgccaccctgtgcagaaatgagagaagacagtgctagagtctatgaaaacgtgggcctgatgcaacagcagaaaagtttcaga

SEQ ID NO: 9642 - protein, 593 aa, Homo sapiens [sequence omitted]

SEQ ID NO: 9643 - DNA, 642 bp, Homo sapiens
  CDS (1)..(642)
atggggaatggaactgaggaagattataactttgtcttcaaggtggtgctgatcggcgaatcaggtgtggggaagaccaatctactctcccgattcacgcgcaatgagttcagccacgacagccgcaccaccatcggggttgagttctccacccgcactgtgatgttgggcaccgctgctgtcaaggctcagatctgggacacagctggcctggagcggtaccgagccatcacctcggcgtactatcgtggtgcagtgggggccctcctggtgtttgacctaaccaagcaccagacctatgctgtggtggagcgatggctgaaggagctctatgaccatgctgaagccacgatcgtcgtcatgctcgtgggtaacaaaagtgacctcagccaggcccgggaagtgcccactgaggaggcccgaatgttcgctgaaaacaatggactgctcttcctggagacctcagccctggactctaccaatgttgagctagcctttgagactgtcctgaaagaaatctttgcgaaggtgtccaagcagagacagaacagcatccggaccaatgccatcactctgggcagtgcccaggctggacaggagcctggccctggggagaagagggcctgttgcatcagcctctga

SEQ ID NO: 9644 - protein, 213 aa, Homo sapiens
MGNGTEEDYNFVFKVVLIGESGVGKTNLLSRFTRNEFSHDSRTTIGVEFSTRTVMLGTAAVKAQIWDTAGLERYRAITSAYYRGAVGALLVFDLTKHQTYAVVERWLKELYDHAEATIVVMLVGNKSDLSQAREVPTEEARMFAENNGLLFLETSALDSTNVELAFETVLKEIFAKVSKQRQNSIRTNAITLGSAQAGQEPGPGEKRACCISL

SEQ ID NO: 9645 - DNA, 633 bp, Homo sapiens
  CDS (1)..(633)
atgcaggccatcaagtgtgtggtggtgggagacggagctgtaggtaaaacttgcctactgatcagttacacaaccaatgcatttcctggagaatatatccctactgtctttgacaattattctgccaatgttatggtagatggaaaaccggtgaatctgggcttatgggatacagctggacaagaagattatgacagattacgccccctatcctatccgcaaacagttggagaaacgtacggtaaggatataacctcccggggcaaagacaagccgattgccgatgtgttcttaatttgcttttcccttgtgagtcctgcatcatttgaaaatgtccgtgcaaagtggtatcctgaggtgcggcaccactgtcccaacactcccatcatcctagtgggaactaaacttgatcttagggatgataaagacacgatcgagaaactgaaggagaagaagctgactcccatcacctatccgcagggtctagccatggctaaggagattggtgctgtaaaatacctggagtgctcggcgctcacacagcgaggcctcaagacagtgtttgacgaagcgatccgagcagtcctctgcccgcctcccgtgaagaagaggaagagaaaatgcctgctgttg

SEQ ID NO: 9646 - protein, 211 aa, Homo sapiens
MQAIKCVVVGDGAVGKTCLLISYTTNAFPGEYIPTVFDNYSANVMVDGKPVNLGLWDTAGQEDYDRLRPLSYPQTVGETYGKDITSRGKDKPIADVFLICFSLVSPASFENVRAKWYPEVRHHCPNTPIILVGTKLDLRDDKDTIEKLKEKKLTPITYPQGLAMAKEIGAVKYLECSALTQRGLKTVFDEAIRAVLCPPPVKKRKRKCLLL

SEQ ID NO: 9647 - DNA, 1944 bp, Homo sapiens
  CDS (1)..(1944)
atggagcacatacagggagcttggaagacgatcagcaatggttttggattcaaagatgccgtgtttgatggctccagctgcatctctcctacaatagttcagcagtttggctatcagcgccgggcatcagatgatggcaaactcacagatccttctaagacaagcaacactatccgtgttttcttgccgaacaagcaaagaacagtggtcaatgtgcgaaatggaatgagcttgcatgactgccttatgaaagcactcaaggtgaggggcctgcaaccagagtgctgtgcagtgttcagacttctccacgaacacaaaggtaaaaaagcacgcttagattggaatactgatgctgcgtctttgattggagaagaacttcaagtagatttcctggatcatgttcccctcacaacacacaactttgctcggaagacgttcctgaagcttgccttctgtgacatctgtcagaaattcctgctcaatggatttcgatgtcagacttgtggctacaaatttcatgagcactgtagcaccaaagtacctactatgtgtgtggactggagtaacatcagacaactcttattgtttccaaattccactattggtgatagtggagtcccagcactaccttctttgactatgcgtcgtatgcgagagtctgtttccaggatgcctgttagttctcagcacagatattctacacctcacgccttcacctttaacacctccagtccctcatctgaaggttccctctcccagaggcagaggtcgacatccacacctaatgtccacatggtcagcaccaccctgcctgtggacagcaggatgattgaggatgcaattcgaagtcacagcgaatcagcctcaccttcagccctgtccagtagccccaacaatctgagcccaacaggctggtcacagccgaaaacccccgtgccagcacaaagagagcgggcaccagtatctgggacccaggagaaaaacaaaattaggcctcgtggacagagagattcaagctattattgggaaatagaagccagtgaagtgatgctgtccactcggattgggtcaggctcttttggaactgtttataagggtaaatggcacggagatgttgcagtaaagatcctaaaggttgtcgacccaaccccagagcaattccaggccttcaggaatgaggtggctgttctgcgcaaaacacggcatgtgaacattctgcttttcatggggtacatgacaaaggacaacctggcaattgtgacccagtggtgcgagggcagcagcctctacaaacacctgcatgtccaggagaccaagtttcagatgttccagctaattgacattgcccggcagacggctcagggaatggactatttgcatgcaaagaacatcatccatagagacatgaaatccaacaatatatttctccatgaaggcttaacagtgaaaattggagattttggtttggcaacagtaaagtcacgctggagtggttctcagcaggttgaacaacctactggctctgtcctctggatggccccagaggtgatccgaatgcaggataacaacccattcagtttccagtcggatgtctactcctatggcatcgtattgtatgaactgatgacgggggagcttccttattctcacatcaacaaccgagatcagatcatcttcatggtgggccgaggatatgcctccccagatcttagtaagctatataagaactgccccaaagcaatgaagaggctggtagctgactgtgtgaagaaagtaaaggaagagaggcctctttttccccagatcctgtcttccattgagctgctccaacactctctaccgaagatcaaccggagcgcttccgagccatccttgcatcgggcagcccacactgaggatatcaatgcttgcacgctgaccacgtccccgaggctgcctgtcttc

SEQ ID NO: 9648 - protein, 648 aa, Homo sapiens [sequence omitted]

SEQ ID NO: 9649 - DNA, 3141 bp, Homo sapiens
  CDS (1)..(3141)
atgatggcggccgaggccggcagtgaggagggcggcccggtaacagccggagctggaggaggcggcgcggcagcgggctccagtgcctatcccgcagtgtgtcgggtgaagatacccgcggccctgcctgtggcagccgccccctatcctgggctggtggagaccggagtggctggaactctgggtggcggagccgctttggggtcagagttcctaggagccgggtctgtggcaggggcactggggggagctggactgacagggggaggtactgctgctggcgtagctggtgctgctgctggcgtggccggtgctgctgttgctggacctagtggagacatggctctcaccaaactgcccacttcgttgcttgctgagactctcgggccaggcggcggttttccccctctgccccctcccccttacctgccccctttgggggcgggcctcgggacagtggacgaaggtgactctctggatggaccagaatacgaggaggaagaggtggccataccgttgaccgctcctccaactaaccagtggtatcacggaaaacttgacagaacgatagcagaagaacgcctcaggcaggcagggaagtctggcagttatcttataagagagagtgatcggaggccagggtcctttgtactttcatttcttagccagatgaatgttgtcaaccattttaggattattgctatgtgtggagattactacattggtggaagacgtttttcttcactgtcagacctaataggttattacagtcatgtttcttgtttgcttaaaggagaaaaattactttacccagttgcaccaccagagccagtagaagatagaaggcgtgtacgagctattctaccttacacaaaagtaccagacactgatgaaataagtttcttaaaaggagatatgttcattgttcataatgaattagaagatggatggatgtgggttacaaatttaagaacagatgaacaaggccttattgttgaagacctagtagaagaggtgggccgggaagaagatccacatgaaggaaaaatatggttccatgggaagatttccaaacaggaagcttataatttactaatgacagttggtcaagtctgcagttttcttgtgaggccctcagataatactcctggcgattattcactttatttccggaccaatgaaaatattcagcgatttaaaatatgtccaacgccaaacaatcagtttatgatgggaggccggtattataacagcattggggacatcatagatcactatcgaaaagaacagattgttgaaggatattatcttaaggaacctgtaccaatgcaggatcaagaacaagtactcaatgacacagtggatggcaaggaaatctataataccatccgtcgtaaaacaaaggatgccttttataaaaacattgttaagaaaggttatcttctgaaaaagggcaaaggaaaacgttggaaaaatttatattttatcttagagggtagtgatgcccaacttatttattttgaaagcgaaaaacgagctaccaaaccaaaaggattaatagatctcagtgtatgttctgtctatgtcgttcatgatagtctctttggcaggccaaactgttttcagatagtagttcagcactttagtgaagaacattacatcttttactttgcaggagaaactccagaacaagcagaggattggatgaaaggtctgcaggcattttgcaatttacggaaaagtagtccagggacatccaataaacgccttcgtcaggtcagcagccttgttttacatattgaagaagcccataaactcccagtaaaacattttactaatccatattgtaacatctacctgaatagtgtccaagtagcaaaaactcatgcaagggaagggcaaaacccagtatggtcagaagagtttgtctttgatgatcttcctcctgacatcaatagatttgaaataactcttagtaataaaacaaagaaaagcaaagatcctgatatcttatttatgcgctgccagttgagccgattacagaaagggcatgccacagatgaatggtttctgctcagctcccatataccattaaaaggtattgaaccagggtccctgcgtgttcgagcacgatactctatggaaaaaatcatgccagaagaagagtacagtgaatttaaagagcttatactgcaaaaggaacttcatgtagtctatgctttatcacatgtatgtggacaagaccgaacactactggccagcatcctactgaggatttttcttcacgaaaagcttgaatcgttgttgttatgcacactaaatgacagagaaataagcatggaagatgaagccactaccctatttcgagccacaacacttgcaagcaccttgatggagcagtatatgaaagccactgctacacagtttgttcatcatgctttgaaagactctattttaaagataatggaaagcaagcagtcttgtgagttaagtccatcaaagttagaaaaaaatgaagatgtgaacactaatttaacacacctattgaacatactttcagagcttgtggagaaaatattcatggcttcagaaatacttccaccgacattgagatatatttatgggtgtttacagaaatctgttcagcataagtggcctacaaataccaccatgagaacaagagttgttagtggttttgtttttcttcgactcatctgtcctgccatcctgaatccacggatgttcaatatcatctcagattctccatctcctattgctgcaagaacactgatattagtggctaaatctgtgcagaacttagcaaatcttgtggaatttggagctaaggagccctacatggaaggtgtcaatccattcatcaaaagcaacaaacatcgtatgatcatgtttttagatgaacttgggaatgtacctgaacttccggacactacagagcattctagaacggacctgtcccgtgatttagcagcattgcatgagatttgcgtggctcattcagatgaacttcgaacgctcagtaatgagcgtggtgcacagcagcacgtattgaaaaagcttctggctataacagaactgcttcaacaaaaacaaaaccagtatacaaaaaccaatgatgtcagg

SEQ ID NO: 9650 - protein, 1047 aa, Homo sapiens
MMAAEAGSEEGGPVTAGAGGGGAAAGSSAYPAVCRVKIPAALPVAAAPYPGLVETGVAGTLGGGAALGSEFLGAGSVAGALGGAGLTGGGTAAGVAGAAAGVAGAAVAGPSGDMALTKLPTSLLAETLGPGGGFPPLPPPPYLPPLGAGLGTVDEGDSLDGPEYEEEEVAIPLTAPPTNQWYHGKLDRTIAEERLRQAGKSGSYLIRESDRRPGSFVLSFLSQMNVVNHFRIIAMCGDYYIGGRRFSSLSDLIGYYSHVSCLLKGEKLLYPVAPPEPVEDRRRVRAILPYTKVPDTDEISFLKGDMFIVHNELEDGWMWVTNLRTDEQGLIVEDLVEEVGREEDPHEGKIWFHGKISKQEAYNLLMTVGQVCSFLVRPSDNTPGDYSLYFRTNENIQRFKICPTPNNQFMMGGRYYNSIGDIIDHYRKEQIVEGYYLKEPVPMQDQEQVLNDTVDGKEIYNTIRRKTKDAFYKNIVKKGYLLKKGKGKRWKNLYFILEGSDAQLIYFESEKRATKPKGLIDLSVCSVYVVHDSLFGRPNCFQIVVQHFSEEHYIFYFAGETPEQAEDWMKGLQAFCNLRKSSPGTSNKRLRQVSSLVLHIEEAHKLPVKHFTNPYCNIYLNSVQVAKTHAREGQNPVWSEEFVFDDLPPDINRFEITLSNKTKKSKDPDILFMRCQLSRLQKGHATDEWFLLSSHIPLKGIEPGSLRVRARYSMEKIMPEEEYSEFKELILQKELHVVYALSHVCGQDRTLLASILLRIFLHEKLESLLLCTLNDREISMEDEATTLFRATTLASTLMEQYMKATATQFVHHALKDSILKIMESKQSCELSPSKLEKNEDVNTNLTHLLNILSELVEKIFMASEILPPTLRYIYGCLQKSVQHKWPTNTTMRTRVVSGFVFLRLICPAILNPRMFNIISDSPSPIAARTLILVAKSVQNLANLVEFGAKEPYMEGVNPFIKSNKHRMIMFLDELGNVPELPDTTEHSRTDLSRDLAALHEICVAHSDELRTLSNERGAQQHVLKKLLAITELLQQKQNQYTKTNDVR

SEQ ID NO: 9651 - DNA, 2784 bp, Homo sapiens
  CDS (1)..(2784)
atgccgcccaaaaccccccgaaaaacggccgccaccgccgccgctgccgccgcggaacccccggcaccgccgccgccgccccctcctgaggaggacccagagcaggacagcggcccggaggacctgcctctcgtcaggcttgagtttgaagaaacagaagaacctgattttactgcattatgtcagaaattaaagataccagatcatgtcagagagagagcttggttaacttgggagaaagtttcatctgtggatggagtattgggaggttatattcaaaagaaaaaggaactgtggggaatctgtatctttattgcagcagttgacctagatgagatgtcgttcacttttactgagctacagaaaaacatagaaatcagtgtccataaattctttaacttactaaaagaaattgataccagtaccaaagttgataatgctatgtcaagactgttgaagaagtatgatgtattgtttgcactcttcagcaaattggaaaggacatgtgaacttatatatttgacacaacccagcagttcgatatctactgaaataaattctgcattggtgctaaaagtttcttggatcacatttttattagctaaaggggaagtattacaaatggaagatgatctggtgatttcatttcagttaatgctatgtgtccttgactattttattaaactctcacctcccatgttgctcaaagaaccatataaaacagctgttatacccattaatggttcacctcgaacacccaggcgaggtcagaacaggagtgcacggatagcaaaacaactagaaaatgatacaagaattattgaagttctctgtaaagaacatgaatgtaatatagatgaggtgaaaaatgtttatttcaaaaattttataccttttatgaattctcttggacttgtaacatctaatggacttccagaggttgaaaatctttctaaacgatacgaagaaatttatcttaaaaataaagatctagatgcaagattatttttggatcatgataaaactcttcagactgattctatagacagttttgaaacacagagaacaccacgaaaaagtaaccttgatgaagaggtgaatgtaattcctccacacactccagttaggactgttatgaacactatccaacaattaatgatgattttaaattcagcaagtgatcaaccttcagaaaatctgatttcctattttaacaactgcacagtgaatccaaaagaaagtatactgaaaagagtgaaggatataggatacatctttaaagagaaatttgctaaagctgtgggacagggttgtgtcgaaattggatcacagcgatacaaacttggagttcgcttgtattaccgagtaatggaatccatgcttaaatcagaagaagaacgattatccattcaaaattttagcaaacttctgaatgacaacatttttcatatgtctttattggcgtgcgctcttgaggttgtaatggccacatatagcagaagtacatctcagaatcttgattctggaacagatttgtctttcccatggattctgaatgtgcttaatttaaaagcctttgatttttacaaagtgatcgaaagttttatcaaagcagaaggcaacttgacaagagaaatgataaaacatttagaacgatgtgaacatcgaatcatggaatcccttgcatggctctcagattcacctttatttgatcttattaaacaatcaaaggaccgagaaggaccaactgatcaccttgaatctgcttgtcctcttaatcttcctctccagaataatcacactgcagcagatatgtatctttctcctgtaagatctccaaagaaaaaaggttcaactacgcgtgtaaattctactgcaaatgcagagacacaagcaacctcagccttccagacccagaagccattgaaatctacctctctttcactgttttataaaaaagtgtatcggctagcctatctccggctaaatacactttgtgaacgccttctgtctgagcacccagaattagaacatatcatctggacccttttccagcacaccctgcagaatgagtatgaactcatgagagacaggcatttggaccaaattatgatgtgttccatgtatggcatatgcaaagtgaagaatatagaccttaaattcaaaatcattgtaacagcatacaaggatcttcctcatgctgttcaggagacattcaaacgtgttttgatcaaagaagaggagtatgattctattatagtattctataactcggtcttcatgcagagactgaaaacaaatattttgcagtatgcttccaccaggccccctaccttgtcaccaatacctcacattcctcgaagcccttacaagtttcctagttcacccttacggattcctggagggaacatctatatttcacccctgaagagtccatataaaatttcagaaggtctgccaacaccaacaaaaatgactccaagatcaagaatcttagtatcaattggtgaatcattcgggacttctgagaagttccagaaaataaatcagatggtatgtaacagcgaccgtgtgctcaaaagaagtgctgaaggaagcaaccctcctaaaccactgaaaaaactacgctttgatattgaaggatcagatgaagcagatggaagtaaacatctcccaggagagtccaaatttcagcagaaactggcagaaatgacttctactcgaacacgaatgcaaaagcagaaaatgaatgatagcatggatacctcaaacaaggaagagaaa

SEQ ID NO: 9652 - protein, 928 aa, Homo sapiens
MPPKTPRKTAATAAAAAAEPPAPPPPPPPEEDPEQDSGPEDLPLVRLEFEETEEPDFTALCQKLKIPDHVRERAWLTWEKVSSVDGVLGGYIQKKKELWGICIFIAAVDLDEMSFTFTELQKNIEISVHKFFNLLKEIDTSTKVDNAMSRLLKKYDVLFALFSKLERTCELIYLTQPSSSISTEINSALVLKVSWITFLLAKGEVLQMEDDLVISFQLMLCVLDYFIKLSPPMLLKEPYKTAVIPINGSPRTPRRGQNRSARIAKQLENDTRIIEVLCKEHECNIDEVKNVYFKNFIPFMNSLGLVTSNGLPEVENLSKRYEEIYLKNKDLDARLFLDHDKTLQTDSIDSFETQRTPRKSNLDEEVNVIPPHTPVRTVMNTIQQLMMILNSASDQPSENLISYFNNCTVNPKESILKRVKDIGYIFKEKFAKAVGQGCVEIGSQRYKLGVRLYYRVMESMLKSEEERLSIQNFSKLLNDNIFHMSLLACALEVVMATYSRSTSQNLDSGTDLSFPWILNVLNLKAFDFYKVIESFIKAEGNLTREMIKHLERCEHRIMESLAWLSDSPLFDLIKQSKDREGPTDHLESACPLNLPLQNNHTAADMYLSPVRSPKKKGSTTRVNSTANAETQATSAFQTQKPLKSTSLSLFYKKVYRLAYLRLNTLCERLLSEHPELEHIIWTLFQHTLQNEYELMRDRHLDQIMMCSMYGICKVKNIDLKFKIIVTAYKDLPHAVQETFKRVLIKEEEYDSIIVFYNSVFMQRLKTNILQYASTRPPTLSPIPHIPRSPYKFPSSPLRIPGGNIYISPLKSPYKISEGLPTPTKMTPRSRILVSIGESFGTSEKFQKINQMVCNSDRVLKRSAEGSNPPKPLKKLRFDIEGSDEADGSKHLPGESKFQQKLAEMTSTRTRMQKQKMNDSMDTSNKEEK

SEQ ID NO: 9653 - DNA, 552 bp, Homo sapiens
  CDS (1)..(552)
atgccgcagtccaagtcccggaagatcgcgatcctgggctaccggtctgtggggaaatcctcattgacgattcaatttgttgaaggccaatttgtggactcctacgatccaaccatagaaaacacttttacaaagttgatcacagtaaatggacaagaatatcatcttcaacttgtagacacagccgggcaagatgaatattctatctttcctcagacatactccatagatattaatggctatattcttgtgtattctgttacatcaatcaaaagttttgaagtgattaaagttatccatggcaaattgttggatatggtggggaaagtacaaatacctattatgttggttgggaataagaaagacctgcatatggaaagggtgatcagttatgaagaagggaaagctttggcagaatcttggaatgcagcttttttggaatcttctgctaaagaaaatcagactgctgtggatgtttttcgaaggataattttggaggcagaaaaaatggacggggcagcttcacaaggcaagtcttcatgctcggtgatg

SEQ ID NO: 9654 - protein, 184 aa, Homo sapiens
MPQSKSRKIAILGYRSVGKSSLTIQFVEGQFVDSYDPTIENTFTKLITVNGQEYHLQLVDTAGQDEYSIFPQTYSIDINGYILVYSVTSIKSFEVIKVIHGKLLDMVGKVQIPIMLVGNKKDLHMERVISYEEGKALAESWNAAFLESSAKENQTAVDVFRRIILEAEKMDGAASQGKSSCSVM

SEQ ID NO: 9655 - DNA, 579 bp, Homo sapiens
  CDS (1)..(579)
atggctgccatccggaagaaactggtgattgttggtgatggagcctgtggaaagacatgcttgctcatagtcttcagcaaggaccagttcccagaggtgtatgtgcccacagtgtttgagaactatgtggcagatatcgaggtggatggaaagcaggtagagttggctttgtgggacacagctgggcaggaagattatgatcgcctgaggcccctctcctacccagataccgatgttatactgatgtgtttttccatcgacagccctgatagtttagaaaacatcccagaaaagtggaccccagaagtcaagcatttctgtcccaacgtgcccatcatcctggttgggaataagaaggatcttcggaatgatgagcacacaaggcgggagctagccaagatgaagcaggagccggtgaaacctgaagaaggcagagatatggcaaacaggattggcgcttttgggtacatggagtgttcagcaaagaccaaagatggagtgagagaggtttttgaaatggctacgagagctgctctgcaagctagacgtgggaagaaaaaatctgggtgccttgtcttg

SEQ ID NO: 9656 - protein, 193 aa, Homo sapiens
MAAIRKKLVIVGDGACGKTCLLIVFSKDQFPEVYVPTVFENYVADIEVDGKQVELALWDTAGQEDYDRLRPLSYPDTDVILMCFSIDSPDSLENIPEKWTPEVKHFCPNVPIILVGNKKDLRNDEHTRRELAKMKQEPVKPEEGRDMANRIGAFGYMECSAKTKDGVREVFEMATRAALQARRGKKKSGCLVL

SEQ ID NO: 9657 - DNA, 612 bp, Homo sapiens
  CDS (1)..(612)
atggccgcggccggctggcgggacggctccggccaggagaagtaccggctcgtggtggtcggcgggggcggcgtgggcaagtcggcgctcaccatccagttcatccagtcctattttgtaacggattatgatccaaccattgaagattcttacacaaagcagtgtgtgatagatgacagagcagcccggctagatattttggatacagcaggacaagaagagtttggagccatgagagaacagtatatgaggactggcgaaggcttcctgttggtcttttcagtcacagatagaggcagttttgaagaaatctataagtttcaaagacagattctcagagtaaaggatcgtgatgagttcccaatgattttaattggtaataaagcagatctggatcatcaaagacaggtaacacaggaagaaggacaacagttagcacggcagcttaaggtaacatacatggaggcatcagcaaagattaggatgaatgtagatcaagctttccatgaacttgtccgggttatcaggaaatttcaagagcaggaatgtcctccttcaccagaaccaacacggaaagaaaaagacaagaaaggctgccattgtgtcattttc

SEQ ID NO: 9658 - protein, 204 aa, Homo sapiens
MAAAGWRDGSGQEKYRLVVVGGGGVGKSALTIQFIQSYFVTDYDPTIEDSYTKQCVIDDRAARLDILDTAGQEEFGAMREQYMRTGEGFLLVFSVTDRGSFEEIYKFQRQILRVKDRDEFPMILIGNKADLDHQRQVTQEEGQQLARQLKVTYMEASAKIRMNVDQAFHELVRVIRKFQEQECPPSPEPTRKEKDKKGCHCVIF

SEQ ID NO: 9659 - DNA, 1440 bp, Homo sapiens
  CDS (1)..(1440)
atggcttcagacagcatatttgagtcatttccttcgtacccacagtgcttcatgagagaatgcatacttggaatgaatccttctagagacgtccacgatgccagcacgagccgccgcttcacgccgccttccaccgcgctgagcccaggcaagatgagcgaggcgttgccgctgggcgccccggacgccggcgctgccctggccggcaagctgaggagcggcgaccgcagcatggtggaggtgctggccgaccacccgggcgagctggtgcgcaccgacagccccaacttcctctgctccgtgctgcctacgcactggcgctgcaacaagaccctgcccatcgctttcaaggtggtggccctaggggatgttccagatggcactctggtcactgtgatggctggcaatgatgaaaactactcggctgagctgagaaatgctaccgcagccatgaagaaccaggttgcaagatttaatgacctcaggtttgtcggtcgaagtggaagagggaaaagcttcactctgaccatcactgtcttcacaaacccaccgcaagtcgccacctaccacagagccatcaaaatcacagtggatgggccccgagaacctcgaagacatcggcagaaactagatgatcagaccaagcccgggagcttgtccttttccgagcggctcagtgaactggagcagctgcggcgcacagccatgagggtcagcccacaccacccagcccccacgcccaaccctcgtgcctccctgaaccactccactgcctttaaccctcagcctcagagtcagatgcaggatacaaggcagatccaaccatccccaccgtggtcctacgatcagtcctaccaatacctgggatccattgcctctccttctgtgcacccagcaacgcccatttcacctggacgtgccagcggcatgacaaccctctctgcagaactttccagtcgactctcaacggcacccgacctgacagcgttcagcgacccgcgccagttccccgcgctgccctccatctccgacccccgcatgcactatccaggcgccttcacctactccccgacgccggtcacctcgggcatcggcatcggcatgtcggccatgggctcggccacgcgctaccacacctacctgccgccgccctaccccggctcgtcgcaagcgcagggaggcccgttccaagccagctcgccctcctaccacctgtactacggcgcctcggccggctcctaccagttctccatggtgggcggcgagcgctcgccgccgcgcatcctgccgccctgcaccaacgcctccaccggctccgcgctgctcaaccccagcctcccgaaccagagcgacgtggtggaggccgagggcagccacagcaactcccccaccaacatggcgccctccgcgcgcctggaggaggccgtgtggaggccctac

SEQ ID NO: 9660 - protein, 480 aa, Homo sapiens
MASDSIFESFPSYPQCFMRECILGMNPSRDVHDASTSRRFTPPSTALSPGKMSEALPLGAPDAGAALAGKLRSGDRSMVEVLADHPGELVRTDSPNFLCSVLPTHWRCNKTLPIAFKVVALGDVPDGTLVTVMAGNDENYSAELRNATAAMKNQVARFNDLRFVGRSGRGKSFTLTITVFTNPPQVATYHRAIKITVDGPREPRRHRQKLDDQTKPGSLSFSERLSELEQLRRTAMRVSPHHPAPTPNPRASLNHSTAFNPQPQSQMQDTRQIQPSPPWSYDQSYQYLGSIASPSVHPATPISPGRASGMTTLSAELSSRLSTAPDLTAFSDPRQFPALPSISDPRMHYPGAFTYSPTPVTSGIGIGMSAMGSATRYHTYLPPPYPGSSQAQGGPFQASSPSYHLYYGASAGSYQFSMVGGERSPPRILPPCTNASTGSALLNPSLPNQSDVVEAEGSHSNSPTNMAPSARLEEAVWRPY

SEQ ID NO: 9661 - DNA, 7695 bp, Homo sapiens
  CDS (1)..(7695)
atgaagcagctgcagccgcagccgcctccgaagatgggggatttctacgacccggagcacccgacccctgaagaagaagaaaatgaggcaaagattgaaaatgtgcagaaaacaggtttcatcaaaggaccaatgttcaaaggtgttgcttctagtcgatttttgcccaaaggcaccaaaacaaaagttaatttggaagaacagggacgacagaaggtgtcattcagcttcagccttacaaagaaaactttgcagaataggtttctcactgcacttggcaatgaaaagcaaagtgatactccaaaccctccagctgtacctcttcaggtagactcgactcctaaaatgaaaatggaaattggtgataccttatctactgcagaagaatcttccccaccaaagtcaagggtggaattgggcaaaattcattttaagaaacatctgcttcatgtaacatccaggccactgctggctactaccacagcagtagcatctccacctactcatgcagcaccattaccagcagtgatagcagaatcaacaactgtagactcaccgccctcatctccgcctccaccgcctccacctgcccaagccacaacactctcatcaccagcaccagtaacagagccagtggccttgccacatacaccaataacagttctaatggcagcaccagtacccttaccagtagatgtagcagttagatctctgaaagaaccaccaattataattgtaccagaatctttagaagcagatactaagcaggacactatatctaatagtttagaagaacacgtaactcaaatattgaatgagcaagcagatatttcctcaaaaaaagaagattcccatattgggaaggatgaagaaattccagatagttctaagattagtctgagctgtaaaaaaacaggttctaagaagaaatcctcacaatctgaaggcatctttcttggttcagaatctgatgaagattctgtacggacttcttcaagtcaaagatcacatgatttaaaattttcagcaagcattgaaaaggaaagagattttaaaaagagctcagcacctttaaaaagtgaggatctagggaaaccttcacgatctaaaacagacagagatgataaatattttagctattcaaaacttgaaagagatactcggtatgtatcttcccgatgtagatcagaaagagagcgacggcggagcagatctcactctaggtctgagagaggctctagaactaatttatcctattccaggtcagaacgatctcattattatgactctgatcgtcgctaccataggagctccccttatcgagagaggacgcgctattctcggccatacacagataacagagcacgagagagttctgactcagaagaagagtataagaagacatactcaaggcgtacctcatctcattcctcttcttacagagacctaaggacatcatcctattctaaatctgatcgggactgtaaaactgagacctcttacttagagatggaaagaagaggcaagtattcttcaaaactagaaagagaatctaaaaggacttcagaaaatgaagcaattaaaagatgttgttctccccctaatgaactgggattccgacgagggtcatcatattctaagcatgacagtagtgcttcccgttataaatctaccctttcaaaacctatacccaagtctgataaatttaaaaattctttctgttgtacagaattaaatgaagaaatcaaacagtctcattcttttagtttacagacaccttgttcaaaaggtagtgaattaagaatgattaataaaaatcctgaaagagaaaaggctgggtctccagctccatcaaatcgattaaatgattcacctactttaaaaaagctagatgaattgcctatttttaagtccgaatttataacacatgatagccatgatagtattaaggaattagactctttatctaaagtgaagaatgatcaattaagaagtttttgtcccatagaattaaatataaatggatctcctggggcagaatctgatttggcaacattttgcacttctaaaactgatgctgttttaatgacttctgatgatagtgtgactggatcggaattatcccctttggtcaaagcatgcatgctttcatcaaatggatttcagaatattagtaggtgcaaagaaaaagacttggatgatacctgcatgctgcataagaagtcagaaagcccatttagagaaacagaacctctggtgtcaccacaccaagataaactcatgtctatgccagttatgactgtggattattccaaaacagtagttaaagaaccagttgatacgagggtttcttgctgcaaaaccaaagattcagacatatactgtactttgaacgatagcaacccttctttgtgtaactctgaagctgaaaatattgagccttcagttatgaagatttcttcaaatagctttatgaatgtgcatttggaatcaaaaccagttatatgtgatagtagaaatttgacagatcactcaaaatttgcatgtgaagaatataagcagagcatcggtagcactagttcagcttctgttaatcattttgatgatttatatcaacctattgggagttcaggtattgcttcatctcttcagagtcttccaccaggaataaaggtggacagtctaactctcttgaaatgcggagagaacacatctccagttctggatgcagtgctaaagagtaaaaaaagttcagagtttttaaagcatgcagggaaagaaacaatagtagaagtaggtagtgaccttcctgattcaggaaagggatttgcttccagggagaacaggcgtaataatgggttatctgggaaatgtttgcaagaggctcaagaagaagggaattccatattgcctgaaagaagaggaagaccagaaatctctttagatgaaagaggagaaggaggacatgtgcatacttctgatgactcagaagttgtattttcttcttgtgatttgaatttaaccatggaagacagtgatggtgtaacttatgcattaaagtgtgacagtagtggtcatgccccagaaattgtgtctacagttcatgaagattattctggctcttctgaaagttcaaatgatgaaagtgattcagaagatacagattcggatgatagcagtattccaagaaaccgtctccagtctgttgtggttgtgccaaagaattctactttgcccatggaagaaacaagtccttgttcttctcggagcagtcaaagttatagacactattctgaccattgggaagatgagagattggagtcaaggagacatttgtatgaggaaaaatttgaaagtatagcaagtaaagcctgtcctcaaactgataagtttttccttcataaaggaacagagaagaatccggaaatttcttttacacagtccagtagaaaacaaatagataatcgcctgcctgaactttctcatcctcagagtgatggggttgatagtacaagtcatacagatgtgaaatctgaccctctgggtcacccaaattcagaggaaaccgtgaaagccaaaataccttctaggcagcaagaagagctgccaatttattcttctgattttgaagatgtcccaaataagtcttggcaacagaccactttccaaaacaggccagatagtagactgggaaaaacagaattgagtttttcttcctcttgtgagataccacatgtggatggcttgcactcatcagaagagctcagaaacttaggttgggacttctctcaagaaaagccttctaccacgtatcagcaacctgacagtagctatggagcttgtggtggacacaagtatcagcaaaatgcagaacagtatggtgggacacgtgattactggcaaggcaatggttactgggatccaagatcaggtagacctcctggaactggggttgtgtatgatcgaactcaaggacaagtaccagattccctaacagatgatcgtgaagaagaggagaattgggatcaacaggatggatcccatttttcagaccagtccgataaatttcttctatcccttcagaaagacaaggggtcagtgcaagcacctgaaataagcagcaattccattaaggacactttagctgtgaatgaaaagaaagatttttcaaaaaacttagaaaaaaatgatatcaaagatagagggcctcttaaaaaaaggaggcaggaaatagagagtgattctgaaagtgatggtgagcttcaggacagaaagaaagttagagtggaggtagagcagggagagacatcagtgcccccaggttcagcactggttgggccctcctgtgtcatggatgacttcagggacccacagcgatggaaggaatgtgccaagcaagggaaaatgccatgttactttgatcttattgaagaaaatgtttatttaacagaaagaaagaagaataaatctcatcgagatattaagcgaatgcagtgtgagtgtacacctctttctaaagatgaaagagctcaaggtgaaatagcatgtggggaagattgtcttaatcgtcttctcatgattgaatgttcttctcggtgtccaaatggggattattgttccaatagacggtttcagagaaaacagcatgcagatgtggaagtcatactcacagaaaagaaaggctggggcttgagagctgccaaagaccttccttcgaacacctttgtcctagaatattgtggagaggtactcgatcataaagagtttaaagctcgagtgaaggagtatgcacgaaacaaaaacatccattactatttcatggccctgaagaatgatgagataatagatgccactcaaaaaggaaattgctctcgtttcatgaatcacagctgtgaaccaaattgtgaaacccaaaaatggactgtgaacggacaactgagggttgggttttttaccaccaaactggttccttcaggctcagagttaacgtttgactatcagttccagagatatggaaaagaagcccagaaatgtttctgcggatcagccaattgccggggttacctgggaggagaaaacagagtcagcatcagagcagcaggagggaaaatgaagaaggaacgatctcgtaagaaggattcagtggatggagagctagaagctctgatggaaaatggtgagggtctctctgataaaaaccaggtgctcagcttatcccggctaatggttagaattgaaactttggagcagaaacttacctgtctggaactcatacagaacacacactcacagtcctgcctgaagtcctttctggaacgtcatgggctgtctttgttgtggatctggatggcagagctaggtgacggccgggaaagtaaccagaagcttcaggaagagattataaagactttggaacacttgcccattcctactaaaaatatgttggaggaaagcaaagtacttccaattattcaacgctggtctcagactaagactgctgtccctccgttgagtgaaggagatgggtattctagtgagaatacatcgcgtgctcatacaccactcaacacacctgatccttccaccaagctgagcacagaagctgacacagacactcccaagaaactaatgtttcgcagactgaaaattataagtgaaaatagcatggacagtgcaatctctgatgcaaccagtgagctagaaggcaaggatggcaaagaggatcttgatcaattagaaaatgtccctgtagaggaagaggaagaattgcagtcacaacagctactcccacaacagctgcctgaatgcaaagttgatagtgaaaccaacatagaagctagtaagctacctacatctgaaccagaagctgacgctgaaatagagcccaaagagagcaacggcacaaaactagaagaacctattaatgaagaaacaccatcccaagatgaagaggagggtgtgtctgatgtggagagtgaaaggagccaagaacagccagataaaacagtggatataagtgatttggccaccaaactcctggacagttggaaagacctaaaggaggtatatcgaattccaaagaaaagtcaaactgaaaaggaaaacacaacaactgaacgaggaagggatgctgttggcttcagagatcaaacacctgccccgaagactcctaataggtcaagagagagagacccagacaagcaaactcaaaataaagagaaaaggaaacgaagaagctccctctcaccaccctcttctgcctatgagcggggaacaaaaaggccagatgacagatatgatacaccaacttctaaaaagaaagtacgaattaaagaccgcaataaactttctacagaggaacgccggaagttgtttgagcaagaggtggctcaacgggaggctcagaaacaacagcaacagatgcagaacctgggaatgacatcaccactgccctatgactctcttggttataatgccccgcatcatccctttgctggttacccaccaggttatcccatgcaggcctatgtggatcccagcaaccctaatgctggaaaggtgctcctgcccacacccagcatggacccagtgtgttctcctgctccttatgatcatgctcagcccttggtgggacattctacagaacccctttctgcccctccaccagtaccagtggtgccacatgtggcagctcctgtggaagtttccagttcccagtatgtggcccagagtgatggtgtagtacaccaagactccagcgttgctgtcttgccagtgccggcccccggcccagttcagggacagaattatagtgtttgggattcaaaccaacagtctgtcagtgtacagcagcagtactctcctgcacagtctcaagcaaccatatattatcaaggacagacatgtccaacagtctatggtgtgacatcaccttattcacagacaactccaccaattgtacagagttatgcccagccaagtcttcagtatatccaggggcaacagattttcacagctcatccacaaggagtggtggtacagccagccgcagcagtgactacaatagttgcaccagggcagcctcagcccttgcagccatctgaaatggttgtgacaaataatctcttggatctgccgcccccctctcctcccaaaccaaaaaccattgtcttacctcccaactggaagacagctcgagatccagaagggaagatttattactaccatgtgatcacaaggcagactcagtgggatcctcctacttgggaaagcccaggagatgatgccagccttgagcatgaagctgagatggacctgggaactccaacatatgatgaaaaccccatgaaggcctcgaaaaagcccaagacagcagaagcagacacctccagtgaactagcaaagaaaagcaaagaagtattcagaaaagagatgtcccagttcatcgtccagtgcctgaacccttaccggaaacctgactgcaaagtgggaagaattaccacaactgaagactttaaacatctggctcgcaagctgactcacggtgttatgaataaggagctgaagtactgtaagaatcctgaggacctggagtgcaatgagaatgtgaaacacaaaaccaaggagtacattaagaagtacatgcagaagtttggggctgtttacaaacccaaagaggacactgaattagagtga

SEQ ID NO: 9662 - protein, 2564 aa, Homo sapiens
MKQLQPQPPPKMGDFYDPEHPTPEEEENEAKIENVQKTGFIKGPMFKGVASSRFLPKGTKTKVNLEEQGRQKVSFSFSLTKKTLQNRFLTALGNEKQSDTPNPPAVPLQVDSTPKMKMEIGDTLSTAEESSPPKSRVELGKIHFKKHLLHVTSRPLLATTTAVASPPTHAAPLPAVIAESTTVDSPPSSPPPPPPPAQATTLSSPAPVTEPVALPHTPITVLMAAPVPLPVDVAVRSLKEPPIIIVPESLEADTKQDTISNSLEEHVTQILNEQADISSKKEDSHIGKDEEIPDSSKISLSCKKTGSKKKSSQSEGIFLGSESDEDSVRTSSSQRSHDLKFSASIEKERDFKKSSAPLKSEDLGKPSRSKTDRDDKYFSYSKLERDTRYVSSRCRSERERRRSRSHSRSERGSRTNLSYSRSERSHYYDSDRRYHRSSPYRERTRYSRPYTDNRARESSDSEEEYKKTYSRRTSSHSSSYRDLRTSSYSKSDRDCKTETSYLEMERRGKYSSKLERESKRTSENEAIKRCCSPPNELGFRRGSSYSKHDSSASRYKSTLSKPIPKSDKFKNSFCCTELNEEIKQSHSFSLQTPCSKGSELRMINKNPEREKAGSPAPSNRLNDSPTLKKLDELPIFKSEFITHDSHDSIKELDSLSKVKNDQLRSFCPIELNINGSPGAESDLATFCTSKTDAVLMTSDDSVTGSELSPLVKACMLSSNGFQNISRCKEKDLDDTCMLHKKSESPFRETEPLVSPHQDKLMSMPVMTVDYSKTVVKEPVDTRVSCCKTKDSDIYCTLNDSNPSLCNSEAENIEPSVMKISSNSFMNVHLESKPVICDSRNLTDHSKFACEEYKQSIGSTSSASVNHFDDLYQPIGSSGIASSLQSLPPGIKVDSLTLLKCGENTSPVLDAVLKSKKSSEFLKHAGKETIVEVGSDLPDSGKGFASRENRRNNGLSGKCLQEAQEEGNSILPERRGRPEISLDERGEGGHVHTSDDSEVVFSSCDLNLTMEDSDGVTYALKCDSSGHAPEIVSTVHEDYSGSSESSNDESDSEDTDSDDSSIPRNRLQSVVVVPKNSTLPMEETSPCSSRSSQSYRHYSDHWEDERLESRRHLYEEKFESIASKACPQTDKFFLHKGTEKNPEISFTQSSRKQIDNRLPELSHPQSDGVDSTSHTDVKSDPLGHPNSEETVKAKIPSRQQEELPIYSSDFEDVPNKSWQQTTFQNRPDSRLGKTELSFSSSCEIPHVDGLHSSEELRNLGWDFSQEKPSTTYQQPDSSYGACGGHKYQQNAEQYGGTRDYWQGNGYWDPRSGRPPGTGVVYDRTQGQVPDSLTDDREEEENWDQQDGSHFSDQSDKFLLSLQKDKGSVQAPEISSNSIKDTLAVNEKKDFSKNLEKNDIKDRGPLKKRRQEIESDSESDGELQDRKKVRVEVEQGETSVPPGSALVGPSCVMDDFRDPQRWKECAKQGKMPCYFDLIEENVYLTERKKNKSHRDIKRMQCECTPLSKDERAQGEIACGEDCLNRLLMIECSSRCPNGDYCSNRRFQRKQHADVEVILTEKKGWGLRAAKDLPSNTFVLEYCGEVLDHKEFKARVKEYARNKNIHYYFMALKNDEIIDATQKGNCSRFMNHSCEPNCETQKWTVNGQLRVGFFTTKLVPSGSELTFDYQFQRYGKEAQKCFCGSANCRGYLGGENRVSIRAAGGKMKKERSRKKDSVDGELEALMENGEGLSDKNQVLSLSRLMVRIETLEQKLTCLELIQNTHSQSCLKSFLERHGLSLLWIWMAELGDGRESNQKLQEEIIKTLEHLPIPTKNMLEESKVLPIIQRWSQTKTAVPPLSEGDGYSSENTSRAHTPLNTPDPSTKLSTEADTDTPKKLMFRRLKIISENSMDSAISDATSELEGKDGKEDLDQLENVPVEEEEELQSQQLLPQQLPECKVDSETNIEASKLPTSEPEADAEIEPKESNGTKLEEPINEETPSQDEEEGVSDVESERSQEQPDKTVDISDLATKLLDSWKDLKEVYRIPKKSQTEKENTTTERGRDAVGFRDQTPAPKTPNRSRERDPDKQTQNKEKRKRRSSLSPPSSAYERGTKRPDDRYDTPTSKKKVRIKDRNKLSTEERRKLFEQEVAQREAQKQQQQMQNLGMTSPLPYDSLGYNAPHHPFAGYPPGYPMQAYVDPSNPNAGKVLLPTPSMDPVCSPAPYDHAQPLVGHSTEPLSAPPPVPVVPHVAAPVEVSSSQYVAQSDGVVHQDSSVAVLPVPAPGPVQGQNYSVWDSNQQSVSVQQQYSPAQSQATIYYQGQTCPTVYGVTSPYSQTTPPIVQSYAQPSLQYIQGQQIFTAHPQGVVVQPAAAVTTIVAPGQPQPLQPSEMVVTNNLLDLPPPSPPKPKTIVLPPNWKTARDPEGKIYYYHVITRQTQWDPPTWESPGDDASLEHEAEMDLGTPTYDENPMKASKKPKTAEADTSSELAKKSKEVFRKEMSQFIVQCLNPYRKPDCKVGRITTTEDFKHLARKLTHGVMNKELKYCKNPEDLECNENVKHKTKEYIKKYMQKFGAVYKPKEDTELE

SEQ ID NO: 9663 - DNA, 3912 bp, Homo sapiens
  CDS (1)..(3912)
atggcgaagatcgccaagactcacgaagatattgaagcacagattcgagaaattcaaggcaagaaggcagctcttgatgaagctcaaggagtgggcctcgattctacaggttattatgaccaggaaatttatggtggaagtgacagcagatttgctggatacgtgacatcaattgctgcaactgaacttgaagatgatgacgatgactattcatcatctacgagtttgcttggtcagaagaagccaggatatcatgcccctgtggcattgcttaatgatataccacagtcaacagaacagtatgatccatttgctgagcacagacctccaaagattgcagaccgggaagatgaatacaaaaagcataggcggaccatgataatttccccagagcgtcttgatccttttgcagatggagggaaaacccctgatcctaaaatgaatgctaggacttacatggatgtaatgcgagaacaacacttgactaaagaagaacgagaaattaggcaacagctagcagaaaaagctaaagctggagaactaaaagtcgtcaatggagcagcagcgtcccagcctccatcaaaacgaaaacggcgttgggatcaaacagctgatcagactcctggtgccactcccaaaaaactatcaagttgggatcaggcagagacccctgggcatactccttccttaagatgggatgagacaccaggtcgtgcaaagggaagcgagactcctggagcaaccccaggctcaaaaatatgggatcctacacctagccacacaccagcgggagctgctactcctggacgaggtgatacaccaggccatgcgacaccaggccatggaggcgcaacttccagtgctcgtaaaaacagatgggatgaaacccccaaaacagagagagatactcctgggcatggaagtggatgggctgagactcctcgaacagatcgaggtggagattctattggtgaaacaccgactcctggagccagtaaaagaaaatcacggtgggatgaaacaccagctagtcagatgggtggaagcactccagttctgacccctggaaagacaccaattggcacaccagccatgaacatggctacccctactccaggtcacataatgagtatgactcctgaacagcttcaggcttggcggtgggaaagagaaattgatgagagaaatcgcccactttctgatgaggaattagatgctatgttcccagaaggatataaggtacttcctcctccagctggttatgttcctattcgaactccagctcgaaagctgacagctactccaacacctttgggtggtatgactggtttccacatgcaaactgaagatcgaactatgaaaagtgttaatgaccagccatctggaaatcttccatttttaaaacctgatgatattcaatactttgataaactattggttgatgttgatgaatcaacacttagtccagaagagcaaaaagagagaaaaataatgaagttgcttttaaaaattaagaatggaacaccaccaatgagaaaggctgcattgcgtcagattactgataaagctcgtgaatttggagctggtcctttgtttaatcagattcttcctctgctgatgtctcctacacttgaggatcaagagcgtcatttacttgtgaaagttattgataggatactgtacaaacttgatgacttagttcgtccatatgtgcataagatcctcgtggtcattgaaccgctattgattgatgaagattactatgctagagtggaaggccgagagatcatttctaatttggcaaaggctgctggtctggctactatgatctctaccatgagacctgatatagataacatggatgagtatgtccgtaacacaacagctagagcttttgctgttgtagcctctgccctgggcattccttctttattgcccttcttaaaagctgtgtgcaaaagcaagaagtcctggcaagcgagacacactggtattaagattgtacaacagatagctattcttatgggctgtgccatcttgccacatcttagaagtttagttgaaatcattgaacatggtcttgtggatgagcagcagaaagttcggaccatcagtgctttggccattgctgccttggctgaagcagcaactccttatggtatcgaatcttttgattctgtgttaaagcctttatggaagggtatccgccaacacagaggaaagggtttggctgctttcttgaaggctattgggtatcttattcctcttatggatgcagaatatgccaactactatactagagaagtgatgttaatccttattcgagaattccagtctcctgatgaggaaatgaaaaaaattgtgctgaaggtggtaaaacagtgttgtgggacagatggtgtagaagcaaactacattaaaacagagattcttcctcccttttttaaacacttctggcagcacaggatggctttggatagaagaaattaccgacagttagttgatactactgtggagttggcaaacaaagtaggtgcagcagaaattatatccaggattgtggatgatctgaaagatgaagccgaacagtacagaaaaatggtgatggagacaattgagaaaattatgggtaatttgggagcagcagatattgatcataaacttgaagaacaactgattgatggtattctttatgctttccaagaacagactacagaggactcagtaatgttgaacggctttggcacagtggttaatgctcttggcaaacgagtcaaaccatacttgcctcagatctgtggtacagttttgtggcgtttaaataacaaatctgctaaagttaggcaacaggcagctgacttgatttctcgaactgctgttgtcatgaagacttgtcaagaggaaaaattgatgggacacttgggtgttgtattgtatgagtatttgggtgaagagtaccctgaagtattgggcagcattcttggagcactgaaggccattgtaaatgtcataggtatgcataagatgactccaccaattaaagatctgctgcctagactcacccccatcttaaagaacagacatgaaaaagtacaagagaattgtattgatcttgttggtcgtattgctgacaggggagctgaatatgtatctgcaagagagtggatgaggatttgctttgagcttttagagctcttaaaagcccacaaaaaggctattcgtagagccacagtcaacacatttggttatattgcaaaggccattggccctcatgatgtattggctacacttctgaacaacctcaaagttcaagaaaggcagaacagagtttgtaccactgtagcaatagctattgttgcagaaacatgttcaccctttacagtactccctgccttaatgaatgaatacagagttcctgaactgaatgttcaaaatggagtgttaaaatcgctttccttcttgtttgaatatattggtgaaatgggaaaagactacatttatgccgtaacaccgttacttgaagatgctttaatggatagagaccttgtacacagacagacggctagtgcagtggtacagcacatgtcacttggggtttatggatttggttgtgaagattcgctgaatcacttgttgaactatgtatggcccaatgtatttgagacatctcctcatgtaattcaggcagttatgggagccctagagggcctgagagttgctattggaccatgtagaatgttgcaatattgtttacagggtctgtttcacccagcccggaaagtcagagatgtatattggaaaatttacaactccatctacattggttcccaggacgctctcatagcacattacccaagaatctacaacgatgataagaacacctatattcgttatgaacttgactatatctta

SEQ ID NO: 9664 - protein, 1304 aa, Homo sapiens
MAKIAKTHEDIEAQIREIQGKKAALDEAQGVGLDSTGYYDQEIYGGSDSRFAGYVTSIAATELEDDDDDYSSSTSLLGQKKPGYHAPVALLNDIPQSTEQYDPFAEHRPPKIADREDEYKKHRRTMIISPERLDPFADGGKTPDPKMNARTYMDVMREQHLTKEEREIRQQLAEKAKAGELKVVNGAAASQPPSKRKRRWDQTADQTPGATPKKLSSWDQAETPGHTPSLRWDETPGRAKGSETPGATPGSKIWDPTPSHTPAGAATPGRGDTPGHATPGHGGATSSARKNRWDETPKTERDTPGHGSGWAETPRTDRGGDSIGETPTPGASKRKSRWDETPASQMGGSTPVLTPGKTPIGTPAMNMATPTPGHIMSMTPEQLQAWRWEREIDERNRPLSDEELDAMFPEGYKVLPPPAGYVPIRTPARKLTATPTPLGGMTGFHMQTEDRTMKSVNDQPSGNLPFLKPDDIQYFDKLLVDVDESTLSPEEQKERKIMKLLLKIKNGTPPMRKAALRQITDKAREFGAGPLFNQILPLLMSPTLEDQERHLLVKVIDRILYKLDDLVRPYVHKILVVIEPLLIDEDYYARVEGREIISNLAKAAGLATMISTMRPDIDNMDEYVRNTTARAFAVVASALGIPSLLPFLKAVCKSKKSWQARHTGIKIVQQIAILMGCAILPHLRSLVEIIEHGLVDEQQKVRTISALAIAALAEAATPYGIESFDSVLKPLWKGIRQHRGKGLAAFLKAIGYLIPLMDAEYANYYTREVMLILIREFQSPDEEMKKIVLKVVKQCCGTDGVEANYIKTEILPPFFKHFWQHRMALDRRNYRQLVDTTVELANKVGAAEIISRIVDDLKDEAEQYRKMVMETIEKIMGNLGAADIDHKLEEQLIDGILYAFQEQTTEDSVMLNGFGTVVNALGKRVKPYLPQICGTVLWRLNNKSAKVRQQAADLISRTAVVMKTCQEEKLMGHLGVVLYEYLGEEYPEVLGSILGALKAIVNVIGMHKMTPPIKDLLPRLTPILKNRHEKVQENCIDLVGRIADRGAEYVSAREWMRICFELLELLKAHKKAIRRATVNTFGYIAKAIGPHDVLATLLNNLKVQERQNRVCTTVAIAIVAETCSPFTVLPALMNEYRVPELNVQNGVLKSLSFLFEYIGEMGKDYIYAVTPLLEDALMDRDLVHRQTASAVVQHMSLGVYGFGCEDSLNHLLNYVWPNVFETSPHVIQAVMGALEGLRVAIGPCRMLQYCLQGLFHPARKVRDVYWKIYNSIYIGSQDALIAHYPRIYNDDKNTYIRYELDYIL

SEQ ID NO: 9665 - DNA, 1275 bp, Homo sapiens
  CDS (1)..(1275)
atgcacaggaagcacctccaggagattccagacctgagtagcaacgttgccaccagcttcacgtggggatgggattccagcaagacttctgaactgctgtcaggcatgggggtctccgccctggagaaagaggagcccgacagtgagaacatcccccaggaactgctctcaaacctgggccacccggagagccccccacggaaacggctgaagagcaaagggagtgacaaagactttgtgattgtccgcaggcctaagctaaatcgagagaactttccaggtgtttcatgggactcccttccggatgagctgctcttgggaatcttttcctgtctgtgcctccctgagctgctaaaggtctctggtgtttgtaagaggtggtatcgcctagcgtctgatgagtctctatggcagaccttagacctcacaggtaaaaatctgcacccggatgtgactggtcggttgctgtctcaaggggtgattgccttccgctgcccacgatcatttatggaccaaccattggctgaacatttcagcccttttcgtgtacagcacatggacctatcgaactcagttatagaagtgtccaccctccacggcatactgtctcagtgttccaagttgcagaatctaagcctggaaggcctgcggctttcggatcccattgtcaatactctcgcaaaaaactcaaatttagtgcgacttaacctttctgggtgttctggattctctgaatttgccctgcagactttgctaagcagctgttccagactggatgagctgaacctctcctggtgttttgatttcactgaaaagcatgtacaggtggctgttgcgcatgtgtcagagaccatcacccagctgaatcttagcggctacagaaagaatctccagaaatcagatctctctactttagttagaagatgccccaatcttgtccatctagacttaagtgatagtgtcatgctaaagaatgactgctttcaggaatttttccagctcaactacctccaacacctatcactcagtcggtgctatgatataatacctgaaactttacttgaacttggagaaattcccacactaaaaacactacaagtttttggaatcgtgccagatggtacccttcaactgttaaaggaagcccttcctcatctacagattaattgctcccatttcaccaccattgccaggccaactattggcaacaaaaagaaccaggagatatggggcatcaaatgccgactgacactgcaaaagcccagttgtctatga

SEQ ID NO: 9666 - protein, 424 aa, Homo sapiens
MHRKHLQEIPDLSSNVATSFTWGWDSSKTSELLSGMGVSALEKEEPDSENIPQELLSNLGHPESPPRKRLKSKGSDKDFVIVRRPKLNRENFPGVSWDSLPDELLLGIFSCLCLPELLKVSGVCKRWYRLASDESLWQTLDLTGKNLHPDVTGRLLSQGVIAFRCPRSFMDQPLAEHFSPFRVQHMDLSNSVIEVSTLHGILSQCSKLQNLSLEGLRLSDPIVNTLAKNSNLVRLNLSGCSGFSEFALQTLLSSCSRLDELNLSWCFDFTEKHVQVAVAHVSETITQLNLSGYRKNLQKSDLSTLVRRCPNLVHLDLSDSVMLKNDCFQEFFQLNYLQHLSLSRCYDIIPETLLELGEIPTLKTLQVFGIVPDGTLQLLKEALPHLQINCSHFTTIARPTIGNKKNQEIWGIKCRLTLQKPSCL

SEQ ID NO: 9667 - DNA, 1401 bp, Homo sapiens
  CDS (1)..(1401)
atgtcgtccatcttgccattcacgccgccagttgtgaagagactgctgggatggaagaagtcagctggtgggtctggaggagcaggcggaggagagcagaatgggcaggaagaaaagtggtgtgagaaagcagtgaaaagtctggtgaagaagctaaagaaaacaggacgattagatgagcttgagaaagccatcaccactcaaaactgtaatactaaatgtgttaccataccaagcacttgctctgaaatttggggactgagtacaccaaatacgatagatcagtgggatacaacaggcctttacagcttctctgaacaaaccaggtctcttgatggtcgtctccaggtatcccatcgaaaaggattgccacatgttatatattgccgattatggcgctggcctgatcttcacagtcatcatgaactcaaggcaattgaaaactgcgaatatgcttttaatcttaaaaaggatgaagtatgtgtaaacccttaccactatcagagagttgagacaccagttttgcctccagtattagtgccccgacacaccgagatcctaacagaacttccgcctctggatgactatactcactccattccagaaaacactaacttcccagcaggaattgagccacagagtaattatattccagaaacgccacctcctggatatatcagtgaagatggagaaacaagtgaccaacagttgaatcaaagtatggacacaggctctccagcagaactatctcctactactctttcccctgttaatcatagcttggatttacagccagttacttactcagaacctgcattttggtgttcgatagcatattatgaattaaatcagagggttggagaaaccttccatgcatcacagccctcactcactgtagatggctttacagacccatcaaattcagagaggttctgcttaggtttactctccaatgttaaccgaaatgccacggtagaaatgacaagaaggcatataggaagaggagtgcgcttatactacataggtggggaagtttttgctgagtgcctaagtgatagtgcaatctttgtgcagagccccaattgtaatcagagatatggctggcaccctgcaacagtgtgtaaaattccaccaggctgtaatctgaagatcttcaacaaccaggaatttgctgctcttctggctcagtctgttaatcagggttttgaagccgtctatcagctaactagaatgtgcaccataagaatgagttttgtgaaagggtggggagcagaataccgaaggcagacggtaacaagtactccttgctggattgaacttcatctgaatggacctctacagtggttggacaaagtattaactcagatgggatccccttcagtgcgttgctcaagcatgtca

SEQ ID NO: 9668 - protein, 467 aa, Homo sapiens
MSSILPFTPPVVKRLLGWKKSAGGSGGAGGGEQNGQEEKWCEKAVKSLVKKLKKTGRLDELEKAITTQNCNTKCVTIPSTCSEIWGLSTPNTIDQWDTTGLYSFSEQTRSLDGRLQVSHRKGLPHVIYCRLWRWPDLHSHHELKAIENCEYAFNLKKDEVCVNPYHYQRVETPVLPPVLVPRHTEILTELPPLDDYTHSIPENTNFPAGIEPQSNYIPETPPPGYISEDGETSDQQLNQSMDTGSPAELSPTTLSPVNHSLDLQPVTYSEPAFWCSIAYYELNQRVGETFHASQPSLTVDGFTDPSNSERFCLGLLSNVNRNATVEMTRRHIGRGVRLYYIGGEVFAECLSDSAIFVQSPNCNQRYGWHPATVCKIPPGCNLKIFNNQEFAALLAQSVNQGFEAVYQLTRMCTIRMSFVKGWGAEYRRQTVTSTPCWIELHLNGPLQWLDKVLTQMGSPSVRCSSMS

SEQ ID NO: 9669 - DNA, 1656 bp, Homo sapiens
  CDS (1)..(1656)
atggacaatatgtctattacgaatacaccaacaagtaatgatgcctgtctgagcattgtgcatagtttgatgtgccatagacaaggtggagagagtgaaacatttgcaaaaagagcaattgaaagtttggtaaagaagctgaaggagaaaaaagatgaattggattctttaataacagctataactacaaatggagctcatcctagtaaatgtgttaccatacagagaacattggatgggaggcttcaggtggctggtcggaaaggatttcctcatgtgatctatgcccgtctctggaggtggcctgatcttcacaaaaatgaactaaaacatgttaaatattgtcagtatgcgtttgacttaaaatgtgatagtgtctgtgtgaatccatatcactacgaacgagttgtatcacctggaattgatctctcaggattaacactgcagagtaatgctccatcaagtatgatggtgaaggatgaatatgtgcatgactttgagggacagccatcgttgtccactgaaggacattcaattcaaaccatccagcatccaccaagtaatcgtgcatcgacagagacatacagcaccccagctctgttagccccatctgagtctaatgctaccagcactgccaactttcccaacattcctgtggcttccacaagtcagcctgccagtatactggggggcagccatagtgaaggactgttgcagatagcatcagggcctcagccaggacagcagcagaatggatttactggtcagccagctacttaccatcataacagcactaccacctggactggaagtaggactgcaccatacacacctaatttgcctcaccaccaaaacggccatcttcagcaccacccgcctatgccgccccatcccggacattactggcctgttcacaatgagcttgcattccagcctcccatttccaatcatcctgctcctgagtattggtgttccattgcttactttgaaatggatgttcaggtaggagagacatttaaggttccttcaagctgccctattgttactgttgatggatacgtggacccttctggaggagatcgcttttgtttgggtcaactctccaatgtccacaggacagaagccattgagagagcaaggttgcacataggcaaaggtgtgcagttggaatgtaaaggtgaaggtgatgtttgggtcaggtgccttagtgaccacgcggtctttgtacagagttactacttagacagagaagctgggcgtgcacctggagatgctgttcataagatctacccaagtgcatatataaaggtctttgatttgcgtcagtgtcatcgacagatgcagcagcaggcggctactgcacaagctgcagcagctgcccaggcagcagccgtggcaggaaacatccctggcccaggatcagtaggtggaatagctccagctatcagtctgtcagctgctgctggaattggtgttgatgaccttcgtcgcttatgcatactcaggatgagttttgtgaaaggctggggaccggattacccaagacagagcatcaaagaaacaccttgctggattgaaattcacttacaccgggccctccagctcctagacgaagtacttcataccatgccgattgcagacccacaacctttagac

SEQ ID NO: 9670 - protein, 552 aa, Homo sapiens
MDNMSITNTPTSNDACLSIVHSLMCHRQGGESETFAKRAIESLVKKLKEKKDELDSLITAITTNGAHPSKCVTIQRTLDGRLQVAGRKGFPHVIYARLWRWPDLHKNELKHVKYCQYAFDLKCDSVCVNPYHYERVVSPGIDLSGLTLQSNAPSSMMVKDEYVHDFEGQPSLSTEGHSIQTIQHPPSNRASTETYSTPALLAPSESNATSTANFPNIPVASTSQPASILGGSHSEGLLQIASGPQPGQQQNGFTGQPATYHHNSTTTWTGSRTAPYTPNLPHHQNGHLQHHPPMPPHPGHYWPVHNELAFQPPISNHPAPEYWCSIAYFEMDVQVGETFKVPSSCPIVTVDGYVDPSGGDRFCLGQLSNVHRTEAIERARLHIGKGVQLECKGEGDVWVRCLSDHAVFVQSYYLDREAGRAPGDAVHKIYPSAYIKVFDLRQCHRQMQQQAATAQAAAAAQAAAVAGNIPGPGSVGGIAPAISLSAAAGIGVDDLRRLCILRMSFVKGWGPDYPRQSIKETPCWIEIHLHRALQLLDEVLHTMPIADPQPLD

SEQ ID NO: 9671 - DNA, 1122 bp, Homo sapiens
  CDS (1)..(1122)
atgtcaagggttccaagtcctccacctccggcagaaatgtcgagtggccccgtagctgagagttggtgctacacacagatcaaggtagtgaaattctcctacatgtggaccatcaataactttagcttttgccgggaggaaatgggtgaagtcattaaaagttctacattttcatcaggagcaaatgataaactgaaatggtgtttgcgagtaaaccccaaagggttagatgaagaaagcaaagattacctgtcactttacctgttactggtcagctgtccaaagagtgaagttcgggcaaaattcaaattctccatcctgaatgccaagggagaagaaaccaaagctatggagagtcaacgggcatataggtttgtgcaaggcaaagactggggattcaagaaattcatccgtagagattttcttttggatgaggccaacgggcttctccctgatgacaagcttaccctcttctgcgaggtgagtgttgtgcaagattctgtcaacatttctggccagaataccatgaacatggtaaaggttcctgagtgccggctggcagatgagttaggaggactgtgggagaattcccggttcacagactgctgcttgtgtgttgccggccaggaattccaggctcacaaggctatcttagcagctcgttctccggtttttagtgccatgtttgaacatgaaatggaggagagcaaaaagaatcgagttgaaatcaatgatgtggagcctgaagtttttaaggaaatgatgtgcttcatttacacggggaaggctccaaacctcgacaaaatggctgatgatttgctggcagctgctgacaagtatgccctggagcgcttaaaggtcatgtgtgaggatgccctctgcagtaacctgtccgtggagaacgctgcagaaattctcatcctggccgacctccacagtgcagatcagttgaaaactcaggcagtggatttcatcaactatcatgcttcggatgtcttggagacctctgggtggaagtcaatggtggtgtcacatccccacttggtggctgaggcataccgctctctggcttcagcacagtgcccttttctgggacccccacgcaaacgcctgaagcaatcc

SEQ ID NO: 9672 - protein, 374 aa, Homo sapiens
MSRVPSPPPPAEMSSGPVAESWCYTQIKVVKFSYMWTINNFSFCREEMGEVIKSSTFSSGANDKLKWCLRVNPKGLDEESKDYLSLYLLLVSCPKSEVRAKFKFSILNAKGEETKAMESQRAYRFVQGKDWGFKKFIRRDFLLDEANGLLPDDKLTLFCEVSVVQDSVNISGQNTMNMVKVPECRLADELGGLWENSRFTDCCLCVAGQEFQAHKAILAARSPVFSAMFEHEMEESKKNRVEINDVEPEVFKEMMCFIYTGKAPNLDKMADDLLAAADKYALERLKVMCEDALCSNLSVENAAEILILADLHSADQLKTQAVDFINYHASDVLETSGWKSMVVSHPHLVAEAYRSLASAQCPFLGPPRKRLKQS

SEQ ID NO: 9673 - DNA, 3399 bp, Homo sapiens
  CDS (1)..(3399)
atgccgcgcgctccccgctgccgagccgtgcgctccctgctgcgcagccactaccgcgaggtgctgccgctggccacgttcgtgcggcgcctggggccccagggctggcggctggtgcagcgcggggacccggcggctttccgcgcgctggtggcccagtgcctggtgtgcgtgccctgggacgcacggccgccccccgccgccccctccttccgccaggtgtcctgcctgaaggagctggtggcccgagtgctgcagaggctgtgcgagcgcggcgcgaagaacgtgctggccttcggcttcgcgctgctggacggggcccgcgggggcccccccgaggccttcaccaccagcgtgcgcagctacctgcccaacacggtgaccgacgcactgcgggggagcggggcgtgggggctgctgctgcgccgcgtgggcgacgacgtgctggttcacctgctggcacgctgcgcgctctttgtgctggtggctcccagctgcgcctaccaggtgtgcgggccgccgctgtaccagctcggcgctgccactcaggcccggcccccgccacacgctagtggaccccgaaggcgtctgggatgcgaacgggcctggaaccatagcgtcagggaggccggggtccccctgggcctgccagccccgggtgcgaggaggcgcgggggcagtgccagccgaagtctgccgttgcccaagaggcccaggcgtggcgctgcccctgagccggagcggacgcccgttgggcaggggtcctgggcccacccgggcaggacgcgtggaccgagtgaccgtggtttctgtgtggtgtcacctgccagacccgccgaagaagccacctctttggagggtgcgctctctggcacgcgccactcccacccatccgtgggccgccagcaccacgcgggccccccatccacatcgcggccaccacgtccctgggacacgccttgtcccccggtgtacgccgagaccaagcacttcctctactcctcaggcgacaaggagcagctgcggccctccttcctactcagctctctgaggcccagcctgactggcgctcggaggctcgtggagaccatctttctgggttccaggccctggatgccagggactccccgcaggttgccccgcctgccccagcgctactggcaaatgcggcccctgtttctggagctgcttgggaaccacgcgcagtgcccctacggggtgctcctcaagacgcactgcccgctgcgagctgcggtcaccccagcagccggtgtctgtgcccgggagaagccccagggctctgtggcggcccccgaggaggaggacacagacccccgtcgcctggtgcagctgctccgccagcacagcagcccctggcaggtgtacggcttcgtgcgggcctgcctgcgccggctggtgcccccaggcctctggggctccaggcacaacgaacgccgcttcctcaggaacaccaagaagttcatctccctggggaagcatgccaagctctcgctgcaggagctgacgtggaagatgagcgtgcgggactgcgcttggctgcgcaggagcccaggggttggctgtgttccggccgcagagcaccgtctgcgtgaggagatcctggccaagttcctgcactggctgatgagtgtgtacgtcgtcgagctgctcaggtctttcttttatgtcacggagaccacgtttcaaaagaacaggctctttttctaccggaagagtgtctggagcaagttgcaaagcattggaatcagacagcacttgaagagggtgcagctgcgggagctgtcggaagcagaggtcaggcagcatcgggaagccaggcccgccctgctgacgtccagactccgcttcatccccaagcctgacgggctgcggccgattgtgaacatggactacgtcgtgggagccagaacgttccgcagagaaaagagggccgagcgtctcacctcgagggtgaaggcactgttcagcgtgctcaactacgagcgggcgcggcgccccggcctcctgggcgcctctgtgctgggcctggacgatatccacagggcctggcgcaccttcgtgctgcgtgtgcgggcccaggacccgccgcctgagctgtactttgtcaaggtggatgtgacgggcgcgtacgacaccatcccccaggacaggctcacggaggtcatcgccagcatcatcaaaccccagaacacgtactgcgtgcgtcggtatgccgtggtccagaaggccgcccatgggcacgtccgcaaggccttcaagagccacgtctctaccttgacagacctccagccgtacatgcgacagttcgtggctcacctgcaggagaccagcccgctgagggatgccgtcgtcatcgagcagagctcctccctgaatgaggccagcagtggcctcttcgacgtcttcctacgcttcatgtgccaccacgccgtgcgcatcaggggcaagtcctacgtccagtgccaggggatcccgcagggctccatcctctccacgctgctctgcagcctgtgctacggcgacatggagaacaagctgtttgcggggattcggcgggacgggctgctcctgcgtttggtggatgatttcttgttggtgacacctcacctcacccacgcgaaaaccttcctcaggaccctggtccgaggtgtccctgagtatggctgcgtggtgaacttgcggaagacagtggtgaacttccctgtagaagacgaggccctgggtggcacggcttttgttcagatgccggcccacggcctattcccctggtgcggcctgctgctggatacccggaccctggaggtgcagagcgactactccagctatgcccggacctccatcagagccagtctcaccttcaaccgcggcttcaaggctgggaggaacatgcgtcgcaaactctttggggtcttgcggctgaagtgtcacagcctgtttctggatttgcaggtgaacagcctccagacggtgtgcaccaacatctacaagatcctcctgctgcaggcgtacaggtttcacgcatgtgtgctgcagctcccatttcatcagcaagtttggaagaaccccacatttttcctgcgcgtcatctctgacacggcctccctctgctactccatcctgaaagccaagaacgcagggatgtcgctgggggccaagggcgccgccggccctctgccctccgaggccgtgcagtggctgtgccaccaagcattcctgctcaagctgactcgacaccgtgtcacctacgtgccactcctggggtcactcaggacagcccagacgcagctgagtcggaagctcccggggacgacgctgactgccctggaggccgcagccaacccggcactgccctcagacttcaagaccatcctggactga

SEQ ID NO: 9674 - protein, 1132 aa, Homo sapiens
MPRAPRCRAVRSLLRSHYREVLPLATFVRRLGPQGWRLVQRGDPAAFRALVAQCLVCVPWDARPPPAAPSFRQVSCLKELVARVLQRLCERGAKNVLAFGFALLDGARGGPPEAFTTSVRSYLPNTVTDALRGSGAWGLLLRRVGDDVLVHLLARCALFVLVAPSCAYQVCGPPLYQLGAATQARPPPHASGPRRRLGCERAWNHSVREAGVPLGLPAPGARRRGGSASRSLPLPKRPRRGAAPEPERTPVGQGSWAHPGRTRGPSDRGFCVVSPARPAEEATSLEGALSGTRHSHPSVGRQHHAGPPSTSRPPRPWDTPCPPVYAETKHFLYSSGDKEQLRPSFLLSSLRPSLTGARRLVETIFLGSRPWMPGTPRRLPRLPQRYWQMRPLFLELLGNHAQCPYGVLLKTHCPLRAAVTPAAGVCAREKPQGSVAAPEEEDTDPRRLVQLLRQHSSPWQVYGFVRACLRRLVPPGLWGSRHNERRFLRNTKKFISLGKHAKLSLQELTWKMSVRDCAWLRRSPGVGCVPAAEHRLREEILAKFLHWLMSVYVVELLRSFFYVTETTFQKNRLFFYRKSVWSKLQSIGIRQHLKRVQLRELSEAEVRQHREARPALLTSRLRFIPKPDGLRPIVNMDYVVGARTFRREKRAERLTSRVKALFSVLNYERARRPGLLGASVLGLDDIHRAWRTFVLRVRAQDPPPELYFVKVDVTGAYDTIPQDRLTEVIASIIKPQNTYCVRRYAVVQKAAHGHVRKAFKSHVSTLTDLQPYMRQFVAHLQETSPLRDAVVIEQSSSLNEASSGLFDVFLRFMCHHAVRIRGKSYVQCQGIPQGSILSTLLCSLCYGDMENKLFAGIRRDGLLLRLVDDFLLVTPHLTHAKTFLRTLVRGVPEYGCVVNLRKTVVNFPVEDEALGGTAFVQMPAHGLFPWCGLLLDTRTLEVQSDYSSYARTSIRASLTFNRGFKAGRNMRRKLFGVLRLKCHSLFLDLQVNSLQTVCTNIYKILLLQAYRFHACVLQLPFHQQVWKNPTFFLRVISDTASLCYSILKAKNAGMSLGAKGAAGPLPSEAVQWLCHQAFLLKLTRHRVTYVPLLGSLRTAQTQLSRKLPGTTLTALEAAANPALPSDFKTILD

SEQ ID NO: 9675 - DNA, 1701 bp, Homo sapiens
  CDS (1)..(1701)
atgggtcgggggctgctcaggggcctgtggccgctgcacatcgtcctgtggacgcgtatcgccagcacgatcccaccgcacgttcagaagtcggttaataacgacatgatagtcactgacaacaacggtgcagtcaagtttccacaactgtgtaaattttgtgatgtgagattttccacctgtgacaaccagaaatcctgcatgagcaactgcagcatcacctccatctgtgagaagccacaggaagtctgtgtggctgtatggagaaagaatgacgagaacataacactagagacagtttgccatgaccccaagctcccctaccatgactttattctggaagatgctgcttctccaaagtgcattatgaaggaaaaaaaaaagcctggtgagactttcttcatgtgttcctgtagctctgatgagtgcaatgacaacatcatcttctcagaagaatataacaccagcaatcctgacttgttgctagtcatatttcaagtgacaggcatcagcctcctgccaccactgggagttgccatatctgtcatcatcatcttctactgctaccgcgttaaccggcagcagaagctgagttcaacctgggaaaccggcaagacgcggaagctcatggagttcagcgagcactgtgccatcatcctggaagatgaccgctctgacatcagctccacgtgtgccaacaacatcaaccacaacacagagctgctgcccattgagctggacaccctggtggggaaaggtcgctttgctgaggtctataaggccaagctgaagcagaacacttcagagcagtttgagacagtggcagtcaagatctttccctatgaggagtatgcctcttggaagacagagaaggacatcttctcagacatcaatctgaagcatgagaacatactccagttcctgacggctgaggagcggaagacggagttggggaaacaatactggctgatcaccgccttccacgccaagggcaacctacaggagtacctgacgcggcatgtcatcagctgggaggacctgcgcaagctgggcagctccctcgcccgggggattgctcacctccacagtgatcacactccatgtgggaggcccaagatgcccatcgtgcacagggacctcaagagctccaatatcctcgtgaagaacgacctaacctgctgcctgtgtgactttgggctttccctgcgtctggaccctactctgtctgtggatgacctggctaacagtgggcaggtgggaactgcaagatacatggctccagaagtcctagaatccaggatgaatttggagaatgttgagtccttcaagcagaccgatgtctactccatggctctggtgctctgggaaatgacatctcgctgtaatgcagtgggagaagtaaaagattatgagcctccatttggttccaaggtgcgggagcacccctgtgtcgaaagcatgaaggacaacgtgttgagagatcgagggcgaccagaaattcccagcttctggctcaaccaccagggcatccagatggtgtgtgagacgttgactgagtgctgggaccacgacccagaggcccgtctcacagcccagtgtgtggcagaacgcttcagtgagctggagcatctggacaggctctcggggaggagctgctcggaggagaagattcctgaagacggctccctaaacactaccaaa

SEQ ID NO: 9676 - protein, 567 aa, Homo sapiens
MGRGLLRGLWPLHIVLWTRIASTIPPHVQKSVNNDMIVTDNNGAVKFPQLCKFCDVRFSTCDNQKSCMSNCSITSICEKPQEVCVAVWRKNDENITLETVCHDPKLPYHDFILEDAASPKCIMKEKKKPGETFFMCSCSSDECNDNIIFSEEYNTSNPDLLLVIFQVTGISLLPPLGVAISVIIIFYCYRVNRQQKLSSTWETGKTRKLMEFSEHCAIILEDDRSDISSTCANNINHNTELLPIELDTLVGKGRFAEVYKAKLKQNTSEQFETVAVKIFPYEEYASWKTEKDIFSDINLKHENILQFLTAEERKTELGKQYWLITAFHAKGNLQEYLTRHVISWEDLRKLGSSLARGIAHLHSDHTPCGRPKMPIVHRDLKSSNILVKNDLTCCLCDFGLSLRLDPTLSVDDLANSGQVGTARYMAPEVLESRMNLENVESFKQTDVYSMALVLWEMTSRCNAVGEVKDYEPPFGSKVREHPCVESMKDNVLRDRGRPEIPSFWLNHQGIQMVCETLTECWDHDPEARLTAQCVAERFSELEHLDRLSGRSCSEEKIPEDGSLNTTK

SEQ ID NO: 9677 - DNA, 1182 bp, Homo sapiens
  CDS (1)..(1182)
atggaggagccgcagtcagatcctagcgtcgagccccctctgagtcaggaaacattttcagacctatggaaactacttcctgaaaacaacgttctgtcccccttgccgtcccaagcaatggatgatttgatgctgtccccggacgatattgaacaatggttcactgaagacccaggtccagatgaagctcccagaatgccagaggctgctccccccgtggcccctgcaccagcagctcctacaccggcggcccctgcaccagccccctcctggcccctgtcatcttctgtcccttcccagaaaacctaccagggcagctacggtttccgtctgggcttcttgcattctgggacagccaagtctgtgacttgcacgtactcccctgccctcaacaagatgttttgccaactggccaagacctgccctgtgcagctgtgggttgattccacacccccgcccggcacccgcgtccgcgccatggccatctacaagcagtcacagcacatgacggaggttgtgaggcgctgcccccaccatgagcgctgctcagatagcgatggtctggcccctcctcagcatcttatccgagtggaaggaaatttgcgtgtggagtatttggatgacagaaacacttttcgacatagtgtggtggtgccctatgagccgcctgaggttggctctgactgtaccaccatccactacaactacatgtgtaacagttcctgcatgggcggcatgaaccggaggcccatcctcaccatcatcacactggaagactccagtggtaatctactgggacggaacagctttgaggtgcgtgtttgtgcctgtcctgggagagaccggcgcacagaggaagagaatctccgcaagaaaggggagcctcaccacgagctgcccccagggagcactaagcgagcactgcccaacaacaccagctcctctccccagccaaagaagaaaccactggatggagaatatttcacccttcagatccgtgggcgtgagcgcttcgagatgttccgagagctgaatgaggccttggaactcaaggatgcccaggctgggaaggagccaggggggagcagggctcactccagccacctgaagtccaaaaagggtcagtctacctcccgccataaaaaactcatgttcaagacagaagggcctgactcagactga

SEQ ID NO: 9678 - protein, 393 aa, Homo sapiens [sequence omitted]

SEQ ID NO: 9679 - DNA, 639 bp, Homo sapiens
  CDS (1)..(639)
atgccccggagggcggagaactgggacgaggccgaggtaggcgcggaggaggcaggcgtcgaagagtacggccctgaagaagacggcggggaggagtcgggcgccgaggagtccggcccggaagagtccggcccggaggaactgggcgccgaggaggagatggaggccgggcggccgcggcccgtgctgcgctcggtgaactcgcgcgagccctcccaggtcatcttctgcaatcgcagtccgcgcgtcgtgctgcccgtatggctcaacttcgacggcgagccgcagccctacccaacgctgccgcctggcacgggccgccgcatccacagctaccgaggtcacctttggctcttcagagatgcagggacacacgatgggcttctggttaaccaaactgaattatttgtgccatctctcaatgttgacggacagcctatttttgccaatatcacactgccagtgtatactctgaaagagcgatgcctccaggttgtccggagcctagtcaagcctgagaattacaggagactggacatcgtcaggtcgctctacgaagatctggaagaccacccaaatgtgcagaaagacctggagcggctgacacaggagcgcattgcacatcaacggatgggagat

SEQ ID NO: 9680 - protein, 213 aa, Homo sapiens
MPRRAENWDEAEVGAEEAGVEEYGPEEDGGEESGAEESGPEESGPEELGAEEEMEAGRPRPVLRSVNSREPSQVIFCNRSPRVVLPVWLNFDGEPQPYPTLPPGTGRRIHSYRGHLWLFRDAGTHDGLLVNQTELFVPSLNVDGQPIFANITLPVYTLKERCLQVVRSLVKPENYRRLDIVRSLYEDLEDHPNVQKDLERLTQERIAHQRMGD

SEQ ID NO: 9681 - DNA, 1515 bp, Homo sapiens
  CDS (1)..(1515)
atggatcccgggcagcagccgccgcctcaaccggccccccagggccaagggcagccgccttcgcagcccccgcaggggcagggcccgccgtccggacccgggcaaccggcacccgcggcgacccaggcggcgccgcaggcaccccccgccgggcatcagatcgtgcacgtccgcggggactcggagaccgacctggaggcgctcttcaacgccgtcatgaaccccaagacggccaacgtgccccagaccgtgcccatgaggctccggaagctgcccgactccttcttcaagccgccggagcccaaatcccactcccgacaggccagtactgatgcaggcactgcaggagccctgactccacagcatgttcgagctcattcctctccagcttctctgcagttgggagctgtttctcctgggacactgacccccactggagtagtctctggcccagcagctacacccacagctcagcatcttcgacagtcttcttttgagatacctgatgatgtacctctgccagcaggttgggagatggcaaagacatcttctggtcagagatacttcttaaatcacatcgatcagacaacaacatggcaggaccccaggaaggccatgctgtcccagatgaacgtcacagcccccaccagtccaccagtgcagcagaatatgatgaactcggcttcaggtcctcttcctgatggatgggaacaagccatgactcaggatggagaaatttactatataaaccataagaacaagaccacctcttggctagacccaaggcttgaccctcgttttgccatgaaccagagaatcagtcagagtgctccagtgaaacagccaccacccctggctccccagagcccacagggaggcgtcatgggtggcagcaactccaaccagcagcaacagatgcgactgcagcaactgcagatggagaaggagaggctgcggctgaaacagcaagaactgcttcggcaggcaatgcggaatatcaatcccagcacagcaaattctccaaaatgtcaggagttagccctgcgtagccagttaccaacactggagcaggatggtgggactcaaaatccagtgtcttctcccgggatgtctcaggaattgagaacaatgacgaccaatagctcagatcctttccttaacagtggcacctatcactctcgagatgagagtacagacagtggactaagcatgagcagctacagtgtccctcgaaccccagatgacttcctgaacagtgtggatgagatggatacaggtgatactatcaaccaaagcaccctgccctcacagcagaaccgtttcccagactaccttgaagccattcctgggacaaatgtggaccttggaacactggaaggagatggaatgaacatagaaggagaggagctgatgccaagtctgcaggaagctttgagttctgacatccttaatgacatggagtctgttttggctgccaccaagctagataaagaaagctttcttacatggttatag

SEQ ID NO: 9682 - protein, 504 aa, Homo sapiens
MDPGQQPPPQPAPQGQGQPPSQPPQGQGPPSGPGQPAPAATQAAPQAPPAGHQIVHVRGDSETDLEALFNAVMNPKTANVPQTVPMRLRKLPDSFFKPPEPKSHSRQASTDAGTAGALTPQHVRAHSSPASLQLGAVSPGTLTPTGVVSGPAATPTAQHLRQSSFEIPDDVPLPAGWEMAKTSSGQRYFLNHIDQTTTWQDPRKAMLSQMNVTAPTSPPVQQNMMNSASGPLPDGWEQAMTQDGEIYYINHKNKTTSWLDPRLDPRFAMNQRISQSAPVKQPPPLAPQSPQGGVMGGSNSNQQQQMRLQQLQMEKERLRLKQQELLRQAMRNINPSTANSPKCQELALRSQLPTLEQDGGTQNPVSSPGMSQELRTMTTNSSDPFLNSGTYHSRDESTDSGLSMSSYSVPRTPDDFLNSVDEMDTGDTINQSTLPSQQNRFPDYLEAIPGTNVDLGTLEGDGMNIEGEELMPSLQEALSSDILNDMESVLAATKLDKESFLTWL

SEQ ID NO: 9683 - DNA, 1482 bp, Homo sapiens
  CDS (1)..(1482)
atgtcgaccacacttctgtccgccttctacgatgtcgacttcttgtgcaagacagagaaatccctggccaacctcaacctgaacaacatgctggacaagaaggcggtggggacgcctgtggccgccgcccccagctcgggcttcgcgccgggattcctccgacggcactcggccagcaacctgcatgcactcgcccaccccgcgcccagccccggcagctgctcgcccaagttcccgggcgccgctaacggcagcagctgcggcagcgcggcggccggcggtccgacctcctacggcacccttaaggagccgtcggggggcggcggcacagccctgctcaacaaggagaacaaattccgggaccgctcgtttagcgagaacggcgatcgcagccagcacctcctgcacctgcagcagcagcagaaggggggcggcggctcccagatcaactccacgcgctacaagaccgagctgtgccggcccttcgaggagagcggcacgtgcaagtacggcgaaaagtgccagttcgcgcatggcttccacgagctgcgcagcctgactcgccatccgaagtacaagaccgagctgtgccgcacctttcataccatcggcttctgcccctatgggccgcgctgccacttcatccacaacgcggacgagcggcggcccgcgccgtcggggggcgcctccggggacctgcgtgcctttggcacgcgcgatgcgttgcacctgggcttcccgcgggagccgcggcccaagttgcaccacagcctcagcttctcgggcttcccgtcgggccaccatcagcccccgggcggcctcgagtcgccgctgctgctcgacagccccacgtcgcgcacgccgccgccgccctcctgctcttcggcctcgtcctgctcctcctccgcctcctcctgttcctcggcctccgcggcctccacgccctcgggcgccccgacatgctgcgcctccgcggcggccgcggctgcggccgctctgctgtacggcaccgggggcgccgaggacctgctggcgccgggggccccgtgcgcggcctgctcgtcggcctcgtgcgccaacaacgccttcgccttcggtccggagctcagcagcctcatcacgccgctcgccatccagacccacaactttgccgccgtggccgccgccgcctactaccgcagtcagcagcagcagcagcagcagggcctggcgccccccgcgcagccgccggcgccgcccagcgcgaccctccccgccggggccgccgcacctccctcgccgcccttcagcttccagctgccgcgccgcctgtccgactcgcccgtgttcgacgcgccccccagccccccggactcgctgtcggaccgcgacagctacctaagcggctccctgagctccggcagcctcagcggctctgagtctcccagcctcgaccctggccgccgcctgccaatcttcagccgcctctccatctccgacgac

SEQ ID NO: 9684 - protein, 494 aa, Homo sapiens
MSTTLLSAFYDVDFLCKTEKSLANLNLNNMLDKKAVGTPVAAAPSSGFAPGFLRRHSASNLHALAHPAPSPGSCSPKFPGAANGSSCGSAAAGGPTSYGTLKEPSGGGGTALLNKENKFRDRSFSENGDRSQHLLHLQQQQKGGGGSQINSTRYKTELCRPFEESGTCKYGEKCQFAHGFHELRSLTRHPKYKTELCRTFHTIGFCPYGPRCHFIHNADERRPAPSGGASGDLRAFGTRDALHLGFPREPRPKLHHSLSFSGFPSGHHQPPGGLESPLLLDSPTSRTPPPPSCSSASSCSSSASSCSSASAASTPSGAPTCCASAAAAAAAALLYGTGGAEDLLAPGAPCAACSSASCANNAFAFGPELSSLITPLAIQTHNFAAVAAAAYYRSQQQQQQQGLAPPAQPPAPPSATLPAGAAAPPSPPFSFQLPRRLSDSPVFDAPPSPPDSLSDRDSYLSGSLSSGSLSGSESPSLDPGRRLPIFSRLSISDD

SEQ ID NO: 9685 - DNA, 2418 bp, Homo sapiens
  CDS (1)..(2418)
atgtcaagctcttcctggctccttctcagccttgttgctgtaactgctgctcagtccaccattgaggaacaggccaagacatttttggacaagtttaaccacgaagccgaagacctgttctatcaaagttcacttgcttcttggaattataacaccaatattactgaagagaatgtccaaaacatgaataatgctggggacaaatggtctgcctttttaaaggaacagtccacacttgcccaaatgtatccactacaagaaattcagaatctcacagtcaagcttcagctgcaggctcttcagcaaaatgggtcttcagtgctctcagaagacaagagcaaacggttgaacacaattctaaatacaatgagcaccatctacagtactggaaaagtttgtaacccagataatccacaagaatgcttattacttgaaccaggtttgaatgaaataatggcaaacagtttagactacaatgagaggctctgggcttgggaaagctggagatctgaggtcggcaagcagctgaggccattatatgaagagtatgtggtcttgaaaaatgagatggcaagagcaaatcattatgaggactatggggattattggagaggagactatgaagtaaatggggtagatggctatgactacagccgcggccagttgattgaagatgtggaacatacctttgaagagattaaaccattatatgaacatcttcatgcctatgtgagggcaaagttgatgaatgcctatccttcctatatcagtccaattggatgcctccctgctcatttgcttggtgatatgtggggtagattttggacaaatctgtactctttgacagttccctttggacagaaaccaaacatagatgttactgatgcaatggtggaccaggcctgggatgcacagagaatattcaaggaggccgagaagttctttgtatctgttggtcttcctaatatgactcaaggattctgggaaaattccatgctaacggacccaggaaatgttcagaaagcagtctgccatcccacagcttgggacctggggaagggcgacttcaggatccttatgtgcacaaaggtgacaatggacgacttcctgacagctcatcatgagatggggcatatccagtatgatatggcatatgctgcacaaccttttctgctaagaaatggagctaatgaaggattccatgaagctgttggggaaatcatgtcactttctgcagccacacctaagcatttaaaatccattggtcttctgtcacccgattttcaagaagacaatgaaacagaaataaacttcctgctcaaacaagcactcacgattgttgggactctgccatttacttacatgttagagaagtggaggtggatggtctttaaaggggaaattcccaaagaccagtggatgaaaaagtggtgggagatgaagcgagagatagttggggtggtggaacctgtgccccatgatgaaacatactgtgaccccgcatctctgttccatgtttctaatgattactcattcattcgatattacacaaggaccctttaccaattccagtttcaagaagcactttgtcaagcagctaaacatgaaggccctctgcacaaatgtgacatctcaaactctacagaagctggacagaaactgttcaatatgctgaggcttggaaaatcagaaccctggaccctagcattggaaaatgttgtaggagcaaagaacatgaatgtaaggccactgctcaactactttgagcccttatttacctggctgaaagaccagaacaagaattcttttgtgggatggagtaccgactggagtccatatgcagaccaaagcatcaaagtgaggataagcctaaaatcagctcttggagataaagcatatgaatggaacgacaatgaaatgtacctgttccgatcatctgttgcatatgctatgaggcagtactttttaaaagtaaaaaatcagatgattctttttggggaggaggatgtgcgagtggctaatttgaaaccaagaatctcctttaatttctttgtcactgcacctaaaaatgtgtctgatatcattcctagaactgaagttgaaaaggccatcaggatgtcccggagccgtatcaatgatgctttccgtctgaatgacaacagcctagagtttctggggatacagccaacacttggacctcctaaccagccccctgtttccatatggctgattgtttttggagttgtgatgggagtgatagtggttggcattgtcatcctgatcttcactgggatcagagatcggaagaagaaaaataaagcaagaagtggagaaaatccttatgcctccatcgatattagcaaaggagaaaataatccaggattccaaaacactgatgatgttcagacctccttttag

SEQ ID NO: 9686 - protein, 805 aa, Homo sapiens [sequence omitted]

SEQ ID NO: 9687 - DNA, 3921 bp, Homo sapiens
  CDS (1)..(3921)
atgggggccgcctcgggccgccgggggccggggctgctgctgccgctgccgctgctgttgctgctgccgccgcagcccgccctggcgttggaccccgggctgcagcccggcaacttttctgctgacgaggccggggcgcagctcttcgcgcagagctacaactccagcgccgaacaggtgctgttccagagcgtggccgccagctgggcgcacgacaccaacatcaccgcggagaatgcaaggcgccaggaggaagcagccctgctcagccaggagtttgcggaggcctggggccagaaggccaaggagctgtatgaaccgatctggcagaacttcacggacccgcagctgcgcaggatcatcggagctgtgcgcaccctgggctctgccaacctgcccctggctaagcggcagcagtacaacgccctgctaagcaacatgagcaggatctactccaccgccaaggtctgcctccccaacaagactgccacctgctggtccctggacccagatctcaccaacatcctggcttcctcgcgaagctacgccatgctcctgtttgcctgggagggctggcacaacgctgcgggcatcccgctgaaaccgctgtacgaggatttcactgccctcagcaatgaagcctacaagcaggacggcttcacagacacgggggcctactggcgctcctggtacaactcccccaccttcgaggacgatctggaacacctctaccaacagctagagcccctctacctgaacctccatgccttcgtccgccgcgcactgcatcgccgatacggagacagatacatcaacctcaggggacccatccctgctcatctgctgggagacatgtgggcccagagctgggaaaacatctacgacatggtggtgcctttcccagacaagcccaacctcgatgtcaccagtactatgctgcagcagggctggaacgccacgcacatgttccgggtggcagaggagttcttcacctccctggagctctcccccatgcctcccgagttctgggaagggtcgatgctggagaagccggccgacgggcgggaagtggtgtgccacgcctcggcttgggacttctacaacaggaaagacttcaggatcaagcagtgcacacgggtcacgatggaccagctctccacagtgcaccatgagatgggccatatacagtactacctgcagtacaaggatctgcccgtctccctgcgtcggggggccaaccccggcttccatgaggccattggggacgtgctggcgctctcggtctccactcctgaacatctgcacaaaatcggcctgctggaccgtgtcaccaatgacacggaaagtgacatcaattacttgctaaaaatggcactggaaaaaattgccttcctgccctttggctacttggtggaccagtggcgctggggggtctttagtgggcgtacccccccttcccgctacaacttcgactggtggtatcttcgaaccaagtatcaggggatctgtcctcctgttacccgaaacgaaacccactttgatgctggagctaagtttcatgttccaaatgtgacaccatacatcaggtactttgtgagttttgtcctgcagttccagttccatgaagccctgtgcaaggaggcaggctatgagggcccactgcaccagtgtgacatctaccggtccaccaaggcaggggccaagctccggaaggtgctgcaggctggctcctccaggccctggcaggaggtgctgaaggacatggtcggcttagatgccctggatgcccagccgctgctcaagtacttccagccagtcacccagtggctgcaggagcagaaccagcagaacggcgaggtcctgggctggcccgagtaccagtggcacccgccgttgcctgacaactacccggagggcatagacctggtgactgatgaggctgaggccagcaagtttgtggaggaatatgaccggacatcccaggtggtgtggaacgagtatgccgaggccaactggaactacaacaccaacatcaccacagagaccagcaagattctgctgcagaagaacatgcaaatagccaaccacaccctgaagtacggcacccaggccaggaagtttgatgtgaaccagttgcagaacaccactatcaagcggatcataaagaaggttcaggacctagaacgggcagcactgcctgcccaggagctggaggagtacaacaagatcctgttggatatggaaaccacctacagcgtggccactgtgtgccacccgaatggcagctgcctgcagctcgagccagatctgacgaatgtgatggccacgtcccggaaatatgaagacctgttatgggcatgggagggctggcgagacaaggcggggagagccatcctccagttttacccgaaatacgtggaactcatcaaccaggctgcccggctcaatggctatgtagatgcaggggactcgtggaggtctatgtacgagacaccatccctggagcaagacctggagcggctcttccaggagctgcagccactctacctcaacctgcatgcctacgtgcgccgggccctgcaccgtcactacggggcccagcacatcaacctggaggggcccattcctgctcacctgctggggaacatgtgggcgcagacctggtccaacatctatgacttggtggtgcccttcccttcagccccctcgatggacaccacagaggctatgctaaagcagggctggacgcccaggaggatgtttaaggaggctgatgatttcttcacctccctggggctgctgcccgtgcctcctgagttctggaacaagtcgatgctggagaagccaaccgacgggcgggaggtggtctgccacgcctcggcctgggacttctacaacggcaaggacttccggatcaagcagtgcaccaccgtgaacttggaggacctggtggtggcccaccacgaaatgggccacatccagtatttcatgcagtacaaagacttacctgtggccttgagggagggtgccaaccccggcttccatgaggccattggggacgtgctagccctctcagtgtctacgcccaagcacctgcacagtctcaacctgctgagcagtgagggtggcagcgacgagcatgacatcaactttctgatgaagatggcccttgacaagatcgcctttatccccttcagctacctcgtcgatcagtggcgctggagggtatttgatggaagcatcaccaaggagaactataaccaggagtggtggagcctcaggctgaagtaccagggcctctgccccccagtgcccaggactcaaggtgactttgacccaggggccaagttccacattccttctagcgtgccttacatcaggtactttgtcagcttcatcatccagttccagttccacgaggcactgtgccaggcagctggccacacgggccccctgcacaagtgtgacatctaccagtccaaggaggccgggcagcgcctggcgaccgccatgaagctgggcttcagtaggccgtggccggaagccatgcagctgatcacgggccagcccaacatgagcgcctcggccatgttgagctacttcaagccgctgctggactggctccgcacggagaacgagctgcatggggagaagctgggctggccgcagtacaactggacgccgaactccgctcgctcagaagggcccctcccagacagcggccgcgtcagcttcctgggcctggacctggatgcgcagcaggcccgcgtgggccagtggctgctgctcttcctgggcatcgccctgctggtagccaccctgggcctcagccagcggctcttcagcatccgccaccgcagcctccaccggcactcccacgggccccagttcggctccgaggtggagctgagacactcctga

SEQ ID NO: 9688 - protein, 1306 aa, Homo sapiens
MGAASGRRGPGLLLPLPLLLLLPPQPALALDPGLQPGNFSADEAGAQLFAQSYNSSAEQVLFQSVAASWAHDTNITAENARRQEEAALLSQEFAEAWGQKAKELYEPIWQNFTDPQLRRIIGAVRTLGSANLPLAKRQQYNALLSNMSRIYSTAKVCLPNKTATCWSLDPDLTNILASSRSYAMLLFAWEGWHNAAGIPLKPLYEDFTALSNEAYKQDGFTDTGAYWRSWYNSPTFEDDLEHLYQQLEPLYLNLHAFVRRALHRRYGDRYINLRGPIPAHLLGDMWAQSWENIYDMVVPFPDKPNLDVTSTMLQQGWNATHMFRVAEEFFTSLELSPMPPEFWEGSMLEKPADGREVVCHASAWDFYNRKDFRIKQCTRVTMDQLSTVHHEMGHIQYYLQYKDLPVSLRRGANPGFHEAIGDVLALSVSTPEHLHKIGLLDRVTNDTESDINYLLKMALEKIAFLPFGYLVDQWRWGVFSGRTPPSRYNFDWWYLRTKYQGICPPVTRNETHFDAGAKFHVPNVTPYIRYFVSFVLQFQFHEALCKEAGYEGPLHQCDIYRSTKAGAKLRKVLQAGSSRPWQEVLKDMVGLDALDAQPLLKYFQPVTQWLQEQNQQNGEVLGWPEYQWHPPLPDNYPEGIDLVTDEAEASKFVEEYDRTSQVVWNEYAEANWNYNTNITTETSKILLQKNMQIANHTLKYGTQARKFDVNQLQNTTIKRIIKKVQDLERAALPAQELEEYNKILLDMETTYSVATVCHPNGSCLQLEPDLTNVMATSRKYEDLLWAWEGWRDKAGRAILQFYPKYVELINQAARLNGYVDAGDSWRSMYETPSLEQDLERLFQELQPLYLNLHAYVRRALHRHYGAQHINLEGPIPAHLLGNMWAQTWSNIYDLVVPFPSAPSMDTTEAMLKQGWTPRRMFKEADDFFTSLGLLPVPPEFWNKSMLEKPTDGREVVCHASAWDFYNGKDFRIKQCTTVNLEDLVVAHHEMGHIQYFMQYKDLPVALREGANPGFHEAIGDVLALSVSTPKHLHSLNLLSSEGGSDEHDINFLMKMALDKIAFIPFSYLVDQWRWRVFDGSITKENYNQEWWSLRLKYQGLCPPVPRTQGDFDPGAKFHIPSSVPYIRYFVSFIIQFQFHEALCQAAGHTGPLHKCDIYQSKEAGQRLATAMKLGFSRPWPEAMQLITGQPNMSASAMLSYFKPLLDWLRTENELHGEKLGWPQYNWTPNSARSEGPLPDSGRVSFLGLDLDAQQARVGQWLLLFLGIALLVATLGLSQRLFSIRHRSLHRHSHGPQFGSEVELRHS

SEQ ID NO: 9689 - DNA, 2679 bp, Homo sapiens
  CDS (1)..(2679)
atgcggaaggttaagaaactgcgcctggacaaggagaacaccggaagttggagaagcttctcgctgaattccgagggggctgagaggatggccaccaccgggaccccaacggccgaccgaggcgacgcagccgccacagatgacccggccgcccgcttccaggtgcagaagcactcgtgggacgggctccggagcatcatccacggcagccgcaagtactcgggcctcattgtcaacaaggcgccccacgacttccagtttgtgcagaagacggatgagtctgggccccactcccaccgcctctactacctgggaatgccatatggcagccgagagaactccctcctctactctgagattcccaagaaggtccggaaagaggctctgctgctcctgtcctggaagcagatgctggatcatttccaggccacgccccaccatggggtctactctcgggaggaggagctgctgagggagcggaaacgcctgggggtcttcggcatcacctcctacgacttccacagcgagagtggcctcttcctcttccaggccagcaacagcctcttccactgccgcgacggcggcaagaacggcttcatggtgtcccctatgaaaccgctggaaatcaagacccagtgctcagggccccggatggaccccaaaatctgccctgccgaccctgccttcttctccttcatcaataacagcgacctgtgggtggccaacatcgagacaggcgaggagcggcggctgaccttctgccaccaaggtttatccaatgtcctggatgaccccaagtctgcgggtgtggccaccttcgtcatacaggaagagttcgaccgcttcactgggtactggtggtgccccacagcctcctgggaaggttcagagggcctcaagacgctgcgaatcctgtatgaggaagtcgatgagtccgaggtggaggtcattcacgtcccctctcctgcgctagaagaaaggaagacggactcgtatcggtaccccaggacaggcagcaagaatcccaagattgccttgaaactggctgagttccagactgacagccagggcaagatcgtctcgacccaggagaaggagctggtgcagcccttcagctcgctgttcccgaaggtggagtacatcgccagggccgggtggacccgggatggcaaatacgcctgggccatgttcctggaccggccccagcagtggctccagctcgtcctcctccccccggccctgttcatcccgagcacagagaatgaggagcagcggctagcctctgccagagctgtccccaggaatgtccagccgtatgtggtgtacgaggaggtcaccaacgtctggatcaatgttcatgacatcttctatcccttcccccaatcagagggagaggacgagctctgctttctccgcgccaatgaatgcaagaccggcttctgccatttgtacaaagtcaccgccgttttaaaatcccagggctacgattggagtgagcccttcagccccggggaagatgaatttaagtgccccattaaggaagagattgctctgaccagcggtgaatgggaggttttggcgaggcacggctccaagatctgggtcaatgaggagaccaagctggtgtacttccagggcaccaaggacacgccgctggagcaccacctctacgtggtcagctatgaggcggccggcgagatcgtacgcctcaccacgcccggcttctcccatagctgctccatgagccagaacttcgacatgttcgtcagccactacagcagcgtgagcacgccgccctgcgtgcacgtctacaagctgagcggccccgacgacgaccccctgcacaagcagccccgcttctgggctagcatgatggaggcagccagctgccccccggattatgttcctccagagatcttccatttccacacgcgctcggatgtgcggctctacggcatgatctacaagccccacgccttgcagccagggaagaagcaccccaccgtcctctttgtatatggaggcccccaggtgcagctggtgaataactccttcaaaggcatcaagtacttgcggctcaacacactggcctccctgggctacgccgtggttgtgattgacggcaggggctcctgtcagcgagggcttcggttcgaaggggccctgaaaaaccaaatgggccaggtggagatcgaggaccaggtggagggcctgcagttcgtggccgagaagtatggcttcatcgacctgagccgagttgccatccatggctggtcctacgggggcttcctctcgctcatggggctaatccacaagccccaggtgttcaaggtggccatcgcgggtgccccggtcaccgtctggatggcctacgacacagggtacactgagcgctacatggacgtccctgagaacaaccagcacggctatgaggcgggttccgtggccctgcacgtggagaagctgcccaatgagcccaaccgcttgcttatcctccacggcttcctggacgaaaacgtgcactttttccacacaaacttcctcgtctcccaactgatccgagcagggaaaccttaccagctccagatctaccccaacgagagacacagtattcgctgccccgagtcgggcgagcactatgaagtcacgttgctgcactttctacaggaatacctctga

SEQ ID NO: 9690 - protein, 892 aa, Homo sapiens
MRKVKKLRLDKENTGSWRSFSLNSEGAERMATTGTPTADRGDAAATDDPAARFQVQKHSWDGLRSIIHGSRKYSGLIVNKAPHDFQFVQKTDESGPHSHRLYYLGMPYGSRENSLLYSEIPKKVRKEALLLLSWKQMLDHFQATPHHGVYSREEELLRERKRLGVFGITSYDFHSESGLFLFQASNSLFHCRDGGKNGFMVSPMKPLEIKTQCSGPRMDPKICPADPAFFSFINNSDLWVANIETGEERRLTFCHQGLSNVLDDPKSAGVATFVIQEEFDRFTGYWWCPTASWEGSEGLKTLRILYEEVDESEVEVIHVPSPALEERKTDSYRYPRTGSKNPKIALKLAEFQTDSQGKIVSTQEKELVQPFSSLFPKVEYIARAGWTRDGKYAWAMFLDRPQQWLQLVLLPPALFIPSTENEEQRLASARAVPRNVQPYVVYEEVTNVWINVHDIFYPFPQSEGEDELCFLRANECKTGFCHLYKVTAVLKSQGYDWSEPFSPGEDEFKCPIKEEIALTSGEWEVLARHGSKIWVNEETKLVYFQGTKDTPLEHHLYVVSYEAAGEIVRLTTPGFSHSCSMSQNFDMFVSHYSSVSTPPCVHVYKLSGPDDDPLHKQPRFWASMMEAASCPPDYVPPEIFHFHTRSDVRLYGMIYKPHALQPGKKHPTVLFVYGGPQVQLVNNSFKGIKYLRLNTLASLGYAVVVIDGRGSCQRGLRFEGALKNQMGQVEIEDQVEGLQFVAEKYGFIDLSRVAIHGWSYGGFLSLMGLIHKPQVFKVAIAGAPVTVWMAYDTGYTERYMDVPENNQHGYEAGSVALHVEKLPNEPNRLLILHGFLDENVHFFHTNFLVSQLIRAGKPYQLQIYPNERHSIRCPESGEHYEVTLLHFLQEYL

SEQ ID NO: 9691 - DNA, 2904 bp, Homo sapiens
  CDS (1)..(2904)
atggccaagggcttctatatttccaagtccctgggcatcctggggatcctcctgggcgtggcagccgtgtgcacaatcatcgcactgtcagtggtgtactcccaggagaagaacaagaacgccaacagctcccccgtggcctccaccaccccgtccgcctcagccaccaccaaccccgcctcggccaccaccttggaccaaagtaaagcgtggaatcgttaccgcctccccaacacgctgaaacccgattcctaccgggtgacgctgagaccgtacctcacccccaatgacaggggcctgtacgtttttaagggctccagcaccgtccgtttcacctgcaaggaggccactgacgtcatcatcatccacagcaagaagctcaactacaccctcagccaggggcacagggtggtcctgcgtggtgtgggaggctcccagccccccgacattgacaagactgagctggtggagcccaccgagtacctggtggtgcacctcaagggctccctggtgaaggacagccagtatgagatggacagcgagttcgagggggagttggcagatgacctggcgggcttctaccgcagcgagtacatggagggcaatgtcagaaaggtggtggccactacacagatgcaggctgcagatgcccggaagtccttcccatgcttcgatgagccggccatgaaggccgagttcaacatcacgcttatccaccccaaggacctgacagccctgtccaacatgcttcccaaaggtcccagcaccccacttccagaagaccccaactggaatgtcactgagttccacaccacgcccaagatgtccacgtacttgctggccttcattgtcagtgagttcgactacgtggagaagcaggcatccaatggtgtcttgatccggatctgggcccggcccagtgccattgcggcgggccacggcgattatgccctgaacgtgacgggccccatccttaacttctttgctggtcattatgacacaccctacccactcccaaaatcagaccagattggcctgccagacttcaacgccggcgccatggagaactggggactggtgacctaccgggagaactccctgctgttcgaccccctgtcctcctccagcagcaacaaggagcgggtggtcactgtgattgctcatgagctggcccaccagtggttcgggaacctggtgaccatagagtggtggaatgacctgtggctgaacgagggcttcgcctcctacgtggagtacctgggtgctgactatgcggagcccacctggaacttgaaagacctcatggtgctgaatgatgtgtaccgcgtgatggcagtggatgcactggcctcctcccacccgctgtccacacccgcctcggagatcaacacgccggcccagatcagtgagctgtttgacgccatctcctacagcaagggcgcctcagtcctcaggatgctctccagcttcctgtccgaggacgtattcaagcagggcctggcgtcctacctccacacctttgcctaccagaacaccatctacctgaacctgtgggaccacctgcaggaggctgtgaacaaccggtccatccaactccccaccaccgtgcgggacatcatgaaccgctggaccctgcagatgggcttcccggtcatcacggtggataccagcacggggaccctttcccaggagcacttcctccttgaccccgattccaatgttacccgcccctcagaattcaactacgtgtggattgtgcccatcacatccatcagagatggcagacagcagcaggactactggctgatagatgtaagagcccagaacgatctcttcagcacatcaggcaatgagtgggtcctgctgaacctcaatgtgacgggctattaccgggtgaactacgacgaagagaactggaggaagattcagactcagctgcagagagaccactcggccatccctgtcatcaatcgggcacagatcattaatgacgccttcaacctggccagtgcccataaggtccctgtcactctggcgctgaacaacaccctcttcctgattgaagagagacagtacatgccctgggaggccgccctgagcagcctgagctacttcaagctcatgtttgaccgctccgaggtctatggccccatgaagaactacctgaagaagcaggtcacacccctcttcattcacttcagaaataataccaacaactggagggagatcccagaaaacctgatggaccagtacagcgaggttaatgccatcagcaccgcctgctccaacggagttccagagtgtgaggagatggtctctggccttttcaagcagtggatggagaaccccaataataacccgatccaccccaacctgcggtccaccgtctactgcaacgctatcgcccagggcggggaggaggagtgggacttcgcctgggagcagttccgaaatgccacactggtcaatgaggctgacaagctccgggcagccctggcctgcagcaaagagttgtggatcctgaacaggtacctgagctacaccctgaacccggacttaatccggaagcaggacgccacctctaccatcatcagcattaccaacaacgtcattgggcaaggtctggtctgggactttgtccagagcaactggaagaagctttttaacgattatggtggtggctcgttctccttctccaacctcatccaggcagtgacacgacgattctccaccgagtatgagctgcagcagctggagcagttcaagaaggacaacgaggaaacaggcttcggctcaggcacccgggccctggagcaagccctggagaagacgaaagccaacatcaagtgggtgaaggagaacaaggaggtggtgctccagtggttcacagaaaacagcaaatag

SEQ ID NO: 9692 - protein, 967 aa, Homo sapiens
MAKGFYISKSLGILGILLGVAAVCTIIALSVVYSQEKNKNANSSPVASTTPSASATTNPASATTLDQSKAWNRYRLPNTLKPDSYRVTLRPYLTPNDRGLYVFKGSSTVRFTCKEATDVIIIHSKKLNYTLSQGHRVVLRGVGGSQPPDIDKTELVEPTEYLVVHLKGSLVKDSQYEMDSEFEGELADDLAGFYRSEYMEGNVRKVVATTQMQAADARKSFPCFDEPAMKAEFNITLIHPKDLTALSNMLPKGPSTPLPEDPNWNVTEFHTTPKMSTYLLAFIVSEFDYVEKQASNGVLIRIWARPSAIAAGHGDYALNVTGPILNFFAGHYDTPYPLPKSDQIGLPDFNAGAMENWGLVTYRENSLLFDPLSSSSSNKERVVTVIAHELAHQWFGNLVTIEWWNDLWLNEGFASYVEYLGADYAEPTWNLKDLMVLNDVYRVMAVDALASSHPLSTPASEINTPAQISELFDAISYSKGASVLRMLSSFLSEDVFKQGLASYLHTFAYQNTIYLNLWDHLQEAVNNRSIQLPTTVRDIMNRWTLQMGFPVITVDTSTGTLSQEHFLLDPDSNVTRPSEFNYVWIVPITSIRDGRQQQDYWLIDVRAQNDLFSTSGNEWVLLNLNVTGYYRVNYDEENWRKIQTQLQRDHSAIPVINRAQIINDAFNLASAHKVPVTLALNNTLFLIEERQYMPWEAALSSLSYFKLMFDRSEVYGPMKNYLKKQVTPLFIHFRNNTNNWREIPENLMDQYSEVNAISTACSNGVPECEEMVSGLFKQWMENPNNNPIHPNLRSTVYCNAIAQGGEEEWDFAWEQFRNATLVNEADKLRAALACSKELWILNRYLSYTLNPDLIRKQDATSTIISITNNVIGQGLVWDFVQSNWKKLFNDYGGGSFSFSNLIQAVTRRFSTEYELQQLEQFKKDNEETGFGSGTRALEQALEKTKANIKWVKENKEVVLQWFTENSK

SEQ ID NO: 9693 - DNA, 2208 bp, Homo sapiens
  CDS (1)..(2208)
atgaagacttgggtaaaaatcgtatttggagttgccacctctgctgtgcttgccttattggtgatgtgcattgtcttacgcccttcaagagttcataactctgaagaaaatacaatgagagcactcacactgaaggatattttaaatggaacattttcttataaaacattttttccaaactggatttcaggacaagaatatcttcatcaatctgcagataacaatatagtactttataatattgaaacaggacaatcatataccattttgagtaatagaaccatgctttggagatactcttacacagcaacatattacatctatgaccttagcaatggagaatttgtaagaggaaatgagcttcctcgtccaattcagtatttatgctggtcgcctgttgggagtaaattagcatatgtctatcaaaacaatatctatttgaaacaaagaccaggagatccaccttttcaaataacatttaatggaagagaaaataaaatatttaatggaatcccagactgggtttatgaagaggaaatgcttgctacaaaatatgctctctggtggtctcctaatggaaaatttttggcatatgcggaatttaatgatacggatataccagttattgcctattcctattatggcgatgaacaatatcctagaacaataaatattccatacccaaaggctggagctaagaatcccgttgttcggatatttattatcgataccacttaccctgcgtatgtaggtccccaggaagtgcctgttccagcaatgatagcctcaagtgattattatttcagttggctcacgtgggttactgatgaacgagtatgtttgcagtggctaaaaagagtccagaatgtttcggtcctgtctatatgtgacttcagggaagactggcagacatgggattgtccaaagacccaggagcatatagaagaaagcagaactggatgggctggtggattctttgtttcaacaccagttttcagctatgatgccatttcgtactacaaaatatttagtgacaaggatggctacaaacatattcactatatcaaagacactgtggaaaatgctattcaaattacaagtggcaagtgggaggccataaatatattcagagtaacacaggattcactgttttattctagcaatgaatttgaagaataccctggaagaagaaacatctacagaattagcattggaagctatcctccaagcaagaagtgtgttacttgccatctaaggaaagaaaggtgccaatattacacagcaagtttcagcgactacgccaagtactatgcacttgtctgctacggcccaggcatccccatttccacccttcatgatggacgcactgatcaagaaattaaaatcctggaagaaaacaaggaattggaaaatgctttgaaaaatatccagctgcctaaagaggaaattaagaaacttgaagtagatgaaattactttatggtacaagatgattcttcctcctcaatttgacagatcaaagaagtatcccttgctaattcaagtgtatggtggtccctgcagtcagagtgtaaggtctgtatttgctgttaattggatatcttatcttgcaagtaaggaagggatggtcattgccttggtggatggtcgaggaacagctttccaaggtgacaaactcctctatgcagtgtatcgaaagctgggtgtttatgaagttgaagaccagattacagctgtcagaaaattcatagaaatgggtttcattgatgaaaaaagaatagccatatggggctggtcctatggaggatacgtttcatcactggcccttgcatctggaactggtcttttcaaatgtggtatagcagtggctccagtctccagctgggaatattacgcgtctgtctacacagagagattcatgggtctcccaacaaaggatgataatcttgagcactataagaattcaactgtgatggcaagagcagaatatttcagaaatgtagactatcttctcatccacggaacagcagatgataatgtgcactttcaaaactcagcacagattgctaaagctctggttaatgcacaagtggatttccaggcaatgtggtactctgaccagaaccacggcttatccggcctgtccacgaaccacttatacacccacatgacccacttcctaaagcagtgtttctctttgtcagactaa

SEQ ID NO: 9694 - protein, 735 aa, Homo sapiens
MKTWVKIVFGVATSAVLALLVMCIVLRPSRVHNSEENTMRALTLKDILNGTFSYKTFFPNWISGQEYLHQSADNNIVLYNIETGQSYTILSNRTMLWRYSYTATYYIYDLSNGEFVRGNELPRPIQYLCWSPVGSKLAYVYQNNIYLKQRPGDPPFQITFNGRENKIFNGIPDWVYEEEMLATKYALWWSPNGKFLAYAEFNDTDIPVIAYSYYGDEQYPRTINIPYPKAGAKNPVVRIFIIDTTYPAYVGPQEVPVPAMIASSDYYFSWLTWVTDERVCLQWLKRVQNVSVLSICDFREDWQTWDCPKTQEHIEESRTGWAGGFFVSTPVFSYDAISYYKIFSDKDGYKHIHYIKDTVENAIQITSGKWEAINIFRVTQDSLFYSSNEFEEYPGRRNIYRISIGSYPPSKKCVTCHLRKERCQYYTASFSDYAKYYALVCYGPGIPISTLHDGRTDQEIKILEENKELENALKNIQLPKEEIKKLEVDEITLWYKMILPPQFDRSKKYPLLIQVYGGPCSQSVRSVFAVNWISYLASKEGMVIALVDGRGTAFQGDKLLYAVYRKLGVYEVEDQITAVRKFIEMGFIDEKRIAIWGWSYGGYVSSLALASGTGLFKCGIAVAPVSSWEYYASVYTERFMGLPTKDDNLEHYKNSTVMARAEYFRNVDYLLIHGTADDNVHFQNSAQIAKALVNAQVDFQAMWYSDQNHGLSGLSTNHLYTHMTHFLKQCFSLSD

SEQ ID NO: 9695 - DNA, 2301 bp, Homo sapiens
  CDS (1)..(2301)
atgaagacaccgtggaaggttcttctgggactgctgggtgctgctgcgcttgtcaccatcatcaccgtgcccgtggttctgctgaacaaaggcacagatgatgctacagctgacagtcgcaaaacttacactctaactgattacttaaaaaatacttatagactgaagttatactccttaagatggatttcagatcatgaatatctctacaaacaagaaaataatatcttggtattcaatgctgaatatggaaacagctcagttttcttggagaacagtacatttgatgagtttggacattctatcaatgattattcaatatctcctgatgggcagtttattctcttagaatacaactacgtgaagcaatggaggcattcctacacagcttcatatgacatttatgatttaaataaaaggcagctgattacagaagagaggattccaaacaacacacagtgggtcacatggtcaccagtgggtcataaattggcatatgtttggaacaatgacatttatgttaaaattgaaccaaatttaccaagttacagaatcacatggacggggaaagaagatataatatataatggaataactgactgggtttatgaagaggaagtcttcagtgcctactctgctctgtggtggtctccaaacggcacttttttagcatatgcccaatttaacgacacagaagtcccacttattgaatactccttctactctgatgagtcactgcagtacccaaagactgtacgggttccatatccaaaggcaggagctgtgaatccaactgtaaagttctttgttgtaaatacagactctctcagctcagtcaccaatgcaacttccatacaaatcactgctcctgcttctatgttgataggggatcactacttgtgtgatgtgacatgggcaacacaagaaagaatttctttgcagtggctcaggaggattcagaactattcggtcatggatatttgtgactatgatgaatccagtggaagatggaactgcttagtggcacggcaacacattgaaatgagtactactggctgggttggaagatttaggccttcagaacctcattttacccttgatggtaatagcttctacaagatcatcagcaatgaagaaggttacagacacatttgctatttccaaatagataaaaaagactgcacatttattacaaaaggcacctgggaagtcatcgggatagaagctctaaccagtgattatctatactacattagtaatgaatataaaggaatgccaggaggaaggaatctttataaaatccaacttagtgactatacaaaagtgacatgcctcagttgtgagctgaatccggaaaggtgtcagtactattctgtgtcattcagtaaagaggcgaagtattatcagctgagatgttccggtcctggtctgcccctctatactctacacagcagcgtgaatgataaagggctgagagtcctggaagacaattcagctttggataaaatgctgcagaatgtccagatgccctccaaaaaactggacttcattattttgaatgaaacaaaattttggtatcagatgatcttgcctcctcattttgataaatccaagaaatatcctctactattagatgtgtatgcaggcccatgtagtcaaaaagcagacactgtcttcagactgaactgggccacttaccttgcaagcacagaaaacattatagtagctagctttgatggcagaggaagtggttaccaaggagataagatcatgcatgcaatcaacagaagactgggaacatttgaagttgaagatcaaattgaagcagccagacaattttcaaaaatgggatttgtggacaacaaacgaattgcaatttggggctggtcatatggagggtacgtaacctcaatggtcctgggatcgggaagtggcgtgttcaagtgtggaatagccgtggcgcctgtatcccggtgggagtactatgactcagtgtacacagaacgttacatgggtctcccaactccagaagacaaccttgaccattacagaaattcaacagtcatgagcagagctgaaaattttaaacaagttgagtacctccttattcatggaacagcagatgataacgttcactttcagcagtcagctcagatctccaaagccctggtcgatgttggagtggatttccaggcaatgtggtatactgatgaagaccatggaatagctagcagcacagcacaccaacatatatatacccacatgagccacttcataaaacaatgtttctctttaccttag

SEQ ID NO: 9696 - protein, 766 aa, Homo sapiens
MKTPWKVLLGLLGAAALVTIITVPVVLLNKGTDDATADSRKTYTLTDYLKNTYRLKLYSLRWISDHEYLYKQENNILVFNAEYGNSSVFLENSTFDEFGHSINDYSISPDGQFILLEYNYVKQWRHSYTASYDIYDLNKRQLITEERIPNNTQWVTWSPVGHKLAYVWNNDIYVKIEPNLPSYRITWTGKEDIIYNGITDWVYEEEVFSAYSALWWSPNGTFLAYAQFNDTEVPLIEYSFYSDESLQYPKTVRVPYPKAGAVNPTVKFFVVNTDSLSSVTNATSIQITAPASMLIGDHYLCDVTWATQERISLQWLRRIQNYSVMDICDYDESSGRWNCLVARQHIEMSTTGWVGRFRPSEPHFTLDGNSFYKIISNEEGYRHICYFQIDKKDCTFITKGTWEVIGIEALTSDYLYYISNEYKGMPGGRNLYKIQLSDYTKVTCLSCELNPERCQYYSVSFSKEAKYYQLRCSGPGLPLYTLHSSVNDKGLRVLEDNSALDKMLQNVQMPSKKLDFIILNETKFWYQMILPPHFDKSKKYPLLLDVYAGPCSQKADTVFRLNWATYLASTENIIVASFDGRGSGYQGDKIMHAINRRLGTFEVEDQIEAARQFSKMGFVDNKRIAIWGWSYGGYVTSMVLGSGSGVFKCGIAVAPVSRWEYYDSVYTERYMGLPTPEDNLDHYRNSTVMSRAENFKQVEYLLIHGTADDNVHFQQSAQISKALVDVGVDFQAMWYTDEDHGIASSTAHQHIYTHMSHFIKQCFSLP

SEQ ID NO: 9697 - DNA, 7341 bp, Homo sapiens
  CDS (1)..(7341)
atgcttaggggtccggggcccgggctgctgctgctggccgtccagtgcctggggacagcggtgccctccacgggagcctcgaagagcaagaggcaggctcagcaaatggttcagccccagtccccggtggctgtcagtcaaagcaagcccggttgttatgacaatggaaaacactatcagataaatcaacagtgggagcggacctacctaggcaatgcgttggtttgtacttgttatggaggaagccgaggttttaactgcgagagtaaacctgaagctgaagagacttgctttgacaagtacactgggaacacttaccgagtgggtgacacttatgagcgtcctaaagactccatgatctgggactgtacctgcatcggggctgggcgagggagaataagctgtaccatcgcaaaccgctgccatgaagggggtcagtcctacaagattggtgacacctggaggagaccacatgagactggtggttacatgttagagtgtgtgtgtcttggtaatggaaaaggagaatggacctgcaagcccatagctgagaagtgttttgatcatgctgctgggacttcctatgtggtcggagaaacgtgggagaagccctaccaaggctggatgatggtagattgtacttgcctgggagaaggcagcggacgcatcacttgcacttctagaaatagatgcaacgatcaggacacaaggacatcctatagaattggagacacctggagcaagaaggataatcgaggaaacctgctccagtgcatctgcacaggcaacggccgaggagagtggaagtgtgagaggcacacctctgtgcagaccacatcgagcggatctggccccttcaccgatgttcgtgcagctgtttaccaaccgcagcctcacccccagcctcctccctatggccactgtgtcacagacagtggtgtggtctactctgtggggatgcagtggctgaagacacaaggaaataagcaaatgctttgcacgtgcctgggcaacggagtcagctgccaagagacagctgtaacccagacttacggtggcaactcaaatggagagccatgtgtcttaccattcacctacaatggcaggacgttctactcctgcaccacagaagggcgacaggacggacatctttggtgcagcacaacttcgaattatgagcaggaccagaaatactctttctgcacagaccacactgttttggttcagactcgaggaggaaattccaatggtgccttgtgccacttccccttcctatacaacaaccacaattacactgattgcacttctgagggcagaagagacaacatgaagtggtgtgggaccacacagaactatgatgccgaccagaagtttgggttctgccccatggctgcccacgaggaaatctgcacaaccaatgaaggggtcatgtaccgcattggagatcagtgggataagcagcatgacatgggtcacatgatgaggtgcacgtgtgttgggaatggtcgtggggaatggacatgcattgcctactcgcagcttcgagatcagtgcattgttgatgacatcacttacaatgtgaacgacacattccacaagcgtcatgaagaggggcacatgctgaactgtacatgcttcggtcagggtcggggcaggtggaagtgtgatcccgtcgaccaatgccaggattcagagactgggacgttttatcaaattggagattcatgggagaagtatgtgcatggtgtcagataccagtgctactgctatggccgtggcattggggagtggcattgccaacctttacagacctatccaagctcaagtggtcctgtcgaagtatttatcactgagactccgagtcagcccaactcccaccccatccagtggaatgcaccacagccatctcacatttccaagtacattctcaggtggagacctaaaaattctgtaggccgttggaaggaagctaccataccaggccacttaaactcctacaccatcaaaggcctgaagcctggtgtggtatacgagggccagctcatcagcatccagcagtacggccaccaagaagtgactcgctttgacttcaccaccaccagcaccagcacacctgtgaccagcaacaccgtgacaggagagacgactcccttttctcctcttgtggccacttctgaatctgtgaccgaaatcacagccagtagctttgtggtctcctgggtctcagcttccgacaccgtgtcgggattccgggtggaatatgagctgagtgaggagggagatgagccacagtacctggatcttccaagcacagccacttctgtgaacatccctgacctgcttcctggccgaaaatacattgtaaatgtctatcagatatctgaggatggggagcagagtttgatcctgtctacttcacaaacaacagcgcctgatgcccctcctgacacgactgtggaccaagttgatgacacctcaattgttgttcgctggagcagaccccaggctcccatcacagggtacagaatagtctattcgccatcagtagaaggtagcagcacagaactcaaccttcctgaaactgcaaactccgtcaccctcagtgacttgcaacctggtgttcagtataacatcactatctatgctgtggaagaaaatcaagaaagtacacctgttgtcattcaacaagaaaccactggcaccccacgctcagatacagtgccctctcccagggacctgcagtttgtggaagtgacagacgtgaaggtcaccatcatgtggacaccgcctgagagtgcagtgaccggctaccgtgtggatgtgatccccgtcaacctgcctggcgagcacgggcagaggctgcccatcagcaggaacacctttgcagaagtcaccgggctgtcccctggggtcacctattacttcaaagtctttgcagtgagccatgggagggagagcaagcctctgactgctcaacagacaaccaaactggatgctcccactaacctccagtttgtcaatgaaactgattctactgtcctggtgagatggactccacctcgggcccagataacaggataccgactgaccgtgggccttacccgaagaggacagcccaggcagtacaatgtgggtccctctgtctccaagtacccactgaggaatctgcagcctgcatctgagtacaccgtatccctcgtggccataaagggcaaccaagagagccccaaagccactggagtctttaccacactgcagcctgggagctctattccaccttacaacaccgaggtgactgagaccaccattgtgatcacatggacgcctgctccaagaattggttttaagctgggtgtacgaccaagccagggaggagaggcaccacgagaagtgacttcagactcaggaagcatcgttgtgtccggcttgactccaggagtagaatacgtctacaccatccaagtcctgagagatggacaggaaagagatgcgccaattgtaaacaaagtggtgacaccattgtctccaccaacaaacttgcatctggaggcaaaccctgacactggagtgctcacagtctcctgggagaggagcaccaccccagacattactggttatagaattaccacaacccctacaaacggccagcagggaaattctttggaagaagtggtccatgctgatcagagctcctgcacttttgataacctgagtcccggcctggagtacaatgtcagtgtttacactgtcaaggatgacaaggaaagtgtccctatctctgataccatcatcccagaggtgccccaactcactgacctaagctttgttgatataaccgattcaagcatcggcctgaggtggaccccgctaaactcttccaccattattgggtaccgcatcacagtagttgcggcaggagaaggtatccctatttttgaagattttgtggactcctcagtaggatactacacagtcacagggctggagccgggcattgactatgatatcagcgttatcactctcattaatggcggcgagagtgcccctactacactgacacaacaaacggctgttcctcctcccactgacctgcgattcaccaacattggtccagacaccatgcgtgtcacctgggctccacccccatccattgatttaaccaacttcctggtgcgttactcacctgtgaaaaatgaggaagatgttgcagagttgtcaatttctccttcagacaatgcagtggtcttaacaaatctcctgcctggtacagaatatgtagtgagtgtctccagtgtctacgaacaacatgagagcacacctcttagaggaagacagaaaacaggtcttgattccccaactggcattgacttttctgatattactgccaactcttttactgtgcactggattgctcctcgagccaccatcactggctacaggatccgccatcatcccgagcacttcagtgggagacctcgagaagatcgggtgccccactctcggaattccatcaccctcaccaacctcactccaggcacagagtatgtggtcagcatcgttgctcttaatggcagagaggaaagtcccttattgattggccaacaatcaacagtttctgatgttccgagggacctggaagttgttgctgcgacccccaccagcctactgatcagctgggatgctcctgctgtcacagtgagatattacaggatcacttacggagagacaggaggaaatagccctgtccaggagttcactgtgcctgggagcaagtctacagctaccatcagcggccttaaacctggagttgattataccatcactgtgtatgctgtcactggccgtggagacagccccgcaagcagcaagccaatttccattaattaccgaacagaaattgacaaaccatcccagatgcaagtgaccgatgttcaggacaacagcattagtgtcaagtggctgccttcaagttcccctgttactggttacagagtaaccaccactcccaaaaatggaccaggaccaacaaaaactaaaactgcaggtccagatcaaacagaaatgactattgaaggcttgcagcccacagtggagtatgtggttagtgtctatgctcagaatccaagcggagagagtcagcctctggttcagactgcagtaaccaacattgatcgccctaaaggactggcattcactgatgtggatgtcgattccatcaaaattgcttgggaaagcccacaggggcaagtttccaggtacagggtgacctactcgagccctgaggatggaatccatgagctattccctgcacctgatggtgaagaagacactgcagagctgcaaggcctcagaccgggttctgagtacacagtcagtgtggttgccttgcacgatgatatggagagccagcccctgattggaacccagtccacagctattcctgcaccaactgacctgaagttcactcaggtcacacccacaagcctgagcgcccagtggacaccacccaatgttcagctcactggatatcgagtgcgggtgacccccaaggagaagaccggaccaatgaaagaaatcaaccttgctcctgacagctcatccgtggttgtatcaggacttatggtggccaccaaatatgaagtgagtgtctatgctcttaaggacactttgacaagcagaccagctcagggagttgtcaccactctggagaatgtcagcccaccaagaagggctcgtgtgacagatgctactgagaccaccatcaccattagctggagaaccaagactgagacgatcactggcttccaagttgatgccgttccagccaatggccagactccaatccagagaaccatcaagccagatgtcagaagctacaccatcacaggtttacaaccaggcactgactacaagatctacctgtacaccttgaatgacaatgctcggagctcccctgtggtcatcgacgcctccactgccattgatgcaccatccaacctgcgtttcctggccaccacacccaattccttgctggtatcatggcagccgccacgtgccaggattaccggctacatcatcaagtatgagaagcctgggtctcctcccagagaagtggtccctcggccccgccctggtgtcacagaggctactattactggcctggaaccgggaaccgaatatacaatttatgtcattgccctgaagaataatcagaagagcgagcccctgattggaaggaaaaagacagacgagcttccccaactggtaacccttccacaccccaatcttcatggaccagagatcttggatgttccttccacagttcaaaagacccctttcgtcacccaccctgggtatgacactggaaatggtattcagcttcctggcacttctggtcagcaacccagtgttgggcaacaaatgatctttgaggaacatggttttaggcggaccacaccgcccacaacggccacccccataaggcataggccaagaccatacccgccgaatgtaggacaagaagctctctctcagacaaccatctcatgggccccattccaggacacttctgagtacatcatttcatgtcatcctgttggcactgatgaagaacccttacagttcagggttcctggaacttctaccagtgccactctgacaggcctcaccagaggtgccacctacaacgtcatagtggaggcactgaaagaccagcagaggcataaggttcgggaagaggttgttaccgtgggcaactctgtcaacgaaggcttgaaccaacctacggatgactcgtgctttgacccctacacagtttcccattatgccgttggagatgagtgggaacgaatgtctgaatcaggctttaaactgttgtgccagtgcttaggctttggaagtggtcatttcagatgtgattcatctagatggtgccatgacaatggtgtgaactacaagattggagagaagtgggaccgtcagggagaaaatggccagatgatgagctgcacatgtcttgggaacggaaaaggagaattcaagtgtgaccctcatgaggcaacgtgttatgatgatgggaagacataccacgtaggagaacagtggcagaaggaatatctcggtgccatttgctcctgcacatgctttggaggccagcggggctggcgctgtgacaactgccgcagacctgggggtgaacccagtcccgaaggcactactggccagtcctacaaccagtattctcagagataccatcagagaacaaacactaatgttaattgcccaattgagtgcttcatgcctttagatgtacaggctgacagagaagattcccgagagtaa

SEQ ID NO: 9698 - protein, 2446 aa, Homo sapiens
MLRGPGPGLLLLAVQCLGTAVPSTGASKSKRQAQQMVQPQSPVAVSQSKPGCYDNGKHYQINQQWERTYLGNALVCTCYGGSRGFNCESKPEAEETCFDKYTGNTYRVGDTYERPKDSMIWDCTCIGAGRGRISCTIANRCHEGGQSYKIGDTWRRPHETGGYMLECVCLGNGKGEWTCKPIAEKCFDHAAGTSYVVGETWEKPYQGWMMVDCTCLGEGSGRITCTSRNRCNDQDTRTSYRIGDTWSKKDNRGNLLQCICTGNGRGEWKCERHTSVQTTSSGSGPFTDVRAAVYQPQPHPQPPPYGHCVTDSGVVYSVGMQWLKTQGNKQMLCTCLGNGVSCQETAVTQTYGGNSNGEPCVLPFTYNGRTFYSCTTEGRQDGHLWCSTTSNYEQDQKYSFCTDHTVLVQTRGGNSNGALCHFPFLYNNHNYTDCTSEGRRDNMKWCGTTQNYDADQKFGFCPMAAHEEICTTNEGVMYRIGDQWDKQHDMGHMMRCTCVGNGRGEWTCIAYSQLRDQCIVDDITYNVNDTFHKRHEEGHMLNCTCFGQGRGRWKCDPVDQCQDSETGTFYQIGDSWEKYVHGVRYQCYCYGRGIGEWHCQPLQTYPSSSGPVEVFITETPSQPNSHPIQWNAPQPSHISKYILRWRPKNSVGRWKEATIPGHLNSYTIKGLKPGVVYEGQLISIQQYGHQEVTRFDFTTTSTSTPVTSNTVTGETTPFSPLVATSESVTEITASSFVVSWVSASDTVSGFRVEYELSEEGDEPQYLDLPSTATSVNIPDLLPGRKYIVNVYQISEDGEQSLILSTSQTTAPDAPPDTTVDQVDDTSIVVRWSRPQAPITGYRIVYSPSVEGSSTELNLPETANSVTLSDLQPGVQYNITIYAVEENQESTPVVIQQETTGTPRSDTVPSPRDLQFVEVTDVKVTIMWTPPESAVTGYRVDVIPVNLPGEHGQRLPISRNTFAEVTGLSPGVTYYFKVFAVSHGRESKPLTAQQTTKLDAPTNLQFVNETDSTVLVRWTPPRAQITGYRLTVGLTRRGQPRQYNVGPSVSKYPLRNLQPASEYTVSLVAIKGNQESPKATGVFTTLQPGSSIPPYNTEVTETTIVITWTPAPRIGFKLGVRPSQGGEAPREVTSDSGSIVVSGLTPGVEYVYTIQVLRDGQERDAPIVNKVVTPLSPPTNLHLEANPDTGVLTVSWERSTTPDITGYRITTTPTNGQQGNSLEEVVHADQSSCTFDNLSPGLEYNVSVYTVKDDKESVPISDTIIPEVPQLTDLSFVDITDSSIGLRWTPLNSSTIIGYRITVVAAGEGIPIFEDFVDSSVGYYTVTGLEPGIDYDISVITLINGGESAPTTLTQQTAVPPPTDLRFTNIGPDTMRVTWAPPPSIDLTNFLVRYSPVKNEEDVAELSISPSDNAVVLTNLLPGTEYVVSVSSVYEQHESTPLRGRQKTGLDSPTGIDFSDITANSFTVHWIAPRATITGYRIRHHPEHFSGRPREDRVPHSRNSITLTNLTPGTEYVVSIVALNGREESPLLIGQQSTVSDVPRDLEVVAATPTSLLISWDAPAVTVRYYRITYGETGGNSPVQEFTVPGSKSTATISGLKPGVDYTITVYAVTGRGDSPASSKPISINYRTEIDKPSQMQVTDVQDNSISVKWLPSSSPVTGYRVTTTPKNGPGPTKTKTAGPDQTEMTIEGLQPTVEYVVSVYAQNPSGESQPLVQTAVTNIDRPKGLAFTDVDVDSIKIAWESPQGQVSRYRVTYSSPEDGIHELFPAPDGEEDTAELQGLRPGSEYTVSVVALHDDMESQPLIGTQSTAIPAPTDLKFTQVTPTSLSAQWTPPNVQLTGYRVRVTPKEKTGPMKEINLAPDSSSVVVSGLMVATKYEVSVYALKDTLTSRPAQGVVTTLENVSPPRRARVTDATETTITISWRTKTETITGFQVDAVPANGQTPIQRTIKPDVRSYTITGLQPGTDYKIYLYTLNDNARSSPVVIDASTAIDAPSNLRFLATTPNSLLVSWQPPRARITGYIIKYEKPGSPPREVVPRPRPGVTEATITGLEPGTEYTIYVIALKNNQKSEPLIGRKKTDELPQLVTLPHPNLHGPEILDVPSTVQKTPFVTHPGYDTGNGIQLPGTSGQQPSVGQQMIFEEHGFRRTTPPTTATPIRHRPRPYPPNVGQEALSQTTISWAPFQDTSEYIISCHPVGTDEEPLQFRVPGTSTSATLTGLTRGATYNVIVEALKDQQRHKVREEVVTVGNSVNEGLNQPTDDSCFDPYTVSHYAVGDEWERMSESGFKLLCQCLGFGSGHFRCDSSRWCHDNGVNYKIGEKWDRQGENGQMMSCTCLGNGKGEFKCDPHEATCYDDGKTYHVGEQWQKEYLGAICSCTCFGGQRGWRCDNCRRPGGEPSPEGTTGQSYNQYSQRYHQRTNTNVNCPIECFMPLDVQADREDSRE

SEQ ID NO: 9699 - DNA, 2349 bp, Homo sapiens
  CDS (1)..(2349)
atggcagcagcaatggaaacagaacagctgggtgttgagatatttgaaactgcggactgtgaggagaatattgaatcacaggatcggcctaaattggagcctttttatgttgagcggtattcctggagtcagcttaaaaagctgcttgccgataccagaaaatatcatggctacatgatggctaaggcaccacatgatttcatgtttgtgaagaggaatgatccagatggacctcattcagacagaatctattaccttgccatgtctggtgagaacagagaaaatacactgttttattctgaaattcccaaaactatcaatagagcagcagtcttaatgctctcttggaagcctcttttggatctttttcaggcaacactggactatggaatgtattctcgagaagaagaactattaagagaaagaaaacgcattggaacagtcggaattgcttcttacgattatcaccaaggaagtggaacatttctgtttcaagccggtagtggaatttatcacgtaaaagatggagggccacaaggatttacgcaacaacctttaaggcccaatctagtggaaactagttgtcccaacatacggatggatccaaaattatgccctgctgatccagactggattgcttttatacatagcaacgatatttggatatctaacatcgtaaccagagaagaaaggagactcacttatgtgcacaatgagctagccaacatggaagaagatgccagatcagctggagtcgctacctttgttctccaagaagaatttgatagatattctggctattggtggtgtccaaaagctgaaacaactcccagtggtggtaaaattcttagaattctatatgaagaaaatgatgaatctgaggtggaaattattcatgttacatcccctatgttggaaacaaggagggcagattcattccgttatcctaaaacaggtacagcaaatcctaaagtcacttttaagatgtcagaaataatgattgatgctgaaggaaggatcatagatgtcatagataaggaactaattcaaccttttgagattctatttgaaggagttgaatatattgccagagctggatggactcctgagggaaaatatgcttggtccatcctactagatcgctcccagactcgcctacagatagtgttgatctcacctgaattatttatcccagtagaagatgatgttatggaaaggcagagactcattgagtcagtgcctgattctgtgacgccactaattatctatgaagaaacaacagacatctggataaatatccatgacatctttcatgtttttccccaaagtcacgaagaggaaattgagtttatttttgcctctgaatgcaaaacaggtttccgtcatttatacaaaattacatctattttaaaggaaagcaaatataaacgatccagtggtgggctgcctgctccaagtgatttcaagtgtcctatcaaagaggagatagcaattaccagtggtgaatgggaagttcttggccggcatggatctaatatccaagttgatgaagtcagaaggctggtatattttgaaggcaccaaagactcccctttagagcatcacctgtacgtagtcagttacgtaaatcctggagaggtgacaaggctgactgaccgtggctactcacattcttgctgcatcagtcagcactgtgacttctttataagtaagtatagtaaccagaagaatccacactgtgtgtccctttacaagctatcaagtcctgaagatgacccaacttgcaaaacaaaggaattttgggccaccattttggattcagcaggtcctcttcctgactatactcctccagaaattttctcttttgaaagtactactggatttacattgtatgggatgctctacaagcctcatgatctacagcctggaaagaaatatcctactgtgctgttcatatatggtggtcctcaggttgctattgctggggccccagtcactctgtggatcttctatgatacaggatacacggaacgttatatgggtcaccctgaccagaatgaacagggctattacttaggatctgtggccatgcaagcagaaaagttcccctctgaaccaaatcgtttactgctcttacatggtttcctggatgagaatgtccattttgcacataccagtatattactgagttttttagtgagggctggaaagccatatgatttacagatctatcctcaggagagacacagcataagagttcctgaatcgggagaacattatgaactgcatcttttgcactaccttcaagaaaaccttggatcacgtattgctgctctaaaagtgatataa

SEQ ID NO: 9700 - protein, 782 aa, Homo sapiens
MAAAMETEQLGVEIFETADCEENIESQDRPKLEPFYVERYSWSQLKKLLADTRKYHGYMMAKAPHDFMFVKRNDPDGPHSDRIYYLAMSGENRENTLFYSEIPKTINRAAVLMLSWKPLLDLFQATLDYGMYSREEELLRERKRIGTVGIASYDYHQGSGTFLFQAGSGIYHVKDGGPQGFTQQPLRPNLVETSCPNIRMDPKLCPADPDWIAFIHSNDIWISNIVTREERRLTYVHNELANMEEDARSAGVATFVLQEEFDRYSGYWWCPKAETTPSGGKILRILYEENDESEVEIIHVTSPMLETRRADSFRYPKTGTANPKVTFKMSEIMIDAEGRIIDVIDKELIQPFEILFEGVEYIARAGWTPEGKYAWSILLDRSQTRLQIVLISPELFIPVEDDVMERQRLIESVPDSVTPLIIYEETTDIWINIHDIFHVFPQSHEEEIEFIFASECKTGFRHLYKITSILKESKYKRSSGGLPAPSDFKCPIKEEIAITSGEWEVLGRHGSNIQVDEVRRLVYFEGTKDSPLEHHLYVVSYVNPGEVTRLTDRGYSHSCCISQHCDFFISKYSNQKNPHCVSLYKLSSPEDDPTCKTKEFWATILDSAGPLPDYTPPEIFSFESTTGFTLYGMLYKPHDLQPGKKYPTVLFIYGGPQVAIAGAPVTLWIFYDTGYTERYMGHPDQNEQGYYLGSVAMQAEKFPSEPNRLLLLHGFLDENVHFAHTSILLSFLVRAGKPYDLQIYPQERHSIRVPESGEHYELHLLHYLQENLGSRIAALKVI

SEQ ID NO: 9701 - protein, 60 aa, Artificial Sequence
  Description of Artificial Sequence: Synthetic polypeptide
GRKKRRQRRRPPQGSGSGSMLHDCLMKALKVRGLQPECCAVFRLLHEHKGKKARLDWNTD

What is claimed is:

1. A pharmaceutical composition in unit dose form comprising:
(a) a peptide or salt thereof; and
(b) at least one of a pharmaceutically acceptable: excipient, diluent, or carrier,
wherein the peptide or salt thereof has at least about 80% sequence identity to a polypeptide of any one of SEQ ID NO: 1-9489, and
wherein the peptide or salt thereof:
(i) modulates an expression level of a target protein implicated in a disease or condition, as measured by an at least partial increase or an at least partial decrease of a level of the target protein in an in vitro assay in a cell treated with the peptide or salt thereof as determined by a Western blot relative to a level of the target protein in an otherwise comparable cell not treated with the peptide or salt thereof;
(ii) produces an at least partial increase or an at least partial decrease of an activity of the target protein, as measured by a level of the activity of the target protein in a cell treated with the peptide or salt thereof relative to a level of activity of the target protein in an otherwise comparable cell not treated with the peptide or salt thereof as determined by an in vitro assay;
(iii) produces an at least partial increase or an at least partial decrease of an activity of a protein downstream of the target protein in a cellular pathway in a cell treated with the peptide or salt thereof relative to a level of activity of the protein downstream of the target protein in a cellular pathway in an otherwise comparable cell not treated with the peptide or salt thereof as determined by an in vitro assay;
(iv) kills a cancer cell in an in vitro assay; or
(v) any combination thereof.

2. The pharmaceutical composition of claim 1, wherein the peptide or salt thereof comprises at least about an 80% sequence identity to the polypeptide of SEQ ID NO:9530.

3. The pharmaceutical composition of claim 1, wherein the peptide or salt thereof comprises at least about an 80% sequence identity to the polypeptide of SEQ ID NO:9522.

4. The pharmaceutical composition of claim 1, wherein the peptide or salt thereof comprises at least about an 80% sequence identity to the polypeptide of SEQ ID NO:9521 or SEQ ID NO:9526.

5. The pharmaceutical composition of claim 1, wherein the peptide or salt thereof comprises at least about an 80% sequence identity to the polypeptide of SEQ ID NO:9531 or SEQ ID NO:9701.

6. The pharmaceutical composition of claim 1, wherein the peptide or salt thereof modulates the expression level of the target protein implicated in the disease or condition, as measured by the at least partial increase or the at least partial decrease of the level of the target protein in the in vitro assay in the cell treated with the peptide or salt thereof as determined by the Western blot relative to the level of the target protein in the otherwise comparable cell not treated with the peptide or salt thereof.

7. The pharmaceutical composition of claim 6, wherein the target protein is at least partially encoded by a gene in Table 7, a variant of a gene in Table 7, or a fragment of any of these.

8. The pharmaceutical composition of claim 1, wherein the peptide or salt thereof produces the at least partial increase or the at least partial decrease of the activity of the target protein, as measured by the level of the activity of the target protein in the cell treated with the peptide or salt thereof relative to the level of activity of the target protein in the otherwise comparable cell not treated with the peptide or salt thereof as determined by the in vitro assay.

9. The pharmaceutical composition of claim 8, wherein the target protein is at least partially encoded by a gene in Table 7, a variant of a gene in Table 7, or a fragment of any of these.

10. The pharmaceutical composition of claim 8, wherein the target protein is a kinase or a biologically active fragment thereof.

11. The pharmaceutical composition of claim 8, wherein the target protein is a phosphatase or a biologically active fragment thereof.

12. The pharmaceutical composition of claim 1, wherein the peptide or salt thereof produces the at least partial increase or the at least partial decrease of the activity of the protein downstream of the target protein in a cellular pathway in the cell treated with the peptide or salt thereof relative to the level of the activity of the protein downstream of the target protein in the cellular pathway in the otherwise comparable cell not treated with the peptide or salt thereof as determined by the in vitro assay.

13. The pharmaceutical composition of claim 12, wherein the target protein is at least partially encoded by a gene in Table 7, a variant of a gene in Table 7, or a fragment of any of these.

14. The pharmaceutical composition of claim 1, wherein the target protein comprises a protein at least partially encoded by a gene in Table 7, a variant of a gene in Table 7, or a fragment of any of these.

15. The pharmaceutical composition of claim 1, wherein the peptide or salt thereof kills the cancer cell in the in vitro assay.

16. The pharmaceutical composition of claim 1, wherein the peptide or salt thereof modulates the target protein by at least partially inhibiting a protein to protein interaction.

17. The pharmaceutical composition of claim 16, wherein the protein to protein interaction comprises a ligand to receptor interaction.

18. The pharmaceutical composition of claim 16, wherein the protein to protein interaction comprises a regulatory protein complex.

19. The pharmaceutical composition of claim 1, wherein the peptide or salt thereof at least partially reduces a protein to nucleic acid interaction.

20. The pharmaceutical composition of claim 1, wherein the peptide comprises independently Gly, or an amino acid comprising a C1-C10 alkyl, a C₁-C₁₀ alkenyl, a C₁-C₁₀ alkynyl, a cycloalkyl, or an alkylcycloalkyl side chain.

21. The pharmaceutical composition of claim 1, wherein the peptide comprises an amino acid comprising an aromatic side chain.

22. The pharmaceutical composition of claim 1, wherein the peptide comprises an amino acid comprising a side chain that is at least partially protonated at a pH of about 7.3.

23. The pharmaceutical composition of claim 1, wherein the peptide comprises an amino acid comprising an amide containing side chain.

24. The pharmaceutical composition of claim 1, wherein the peptide comprises an amino acid comprising an alcohol or thiol containing side chain.

25. The pharmaceutical composition of claim 1, wherein the peptide comprises an amino acid comprising a side chain that is at least partially deprotonated at a pH of about 7.3.

26. The pharmaceutical composition of claim 1, wherein the peptide or salt thereof comprises a recombinant peptide.

27. The pharmaceutical composition of claim 1, wherein at least one amino acid of the peptide or salt thereof comprises a chemical modification.

28. The pharmaceutical composition of claim 27, wherein the chemical modification comprises: acetylation, sulfonation, amidation, esterification, or any combination thereof.

29. The pharmaceutical composition of claim 1, wherein the peptide or salt thereof comprises a stapled peptide or salt thereof, a stitched peptide or salt thereof, a macrocyclic peptide or salt thereof, or any combination thereof.

30. The pharmaceutical composition of claim 29, comprising the stapled peptide, wherein the stapled peptide comprises a covalent linkage between two amino acid side-chains.

31. The pharmaceutical composition of claim 1, wherein the peptide or salt thereof further comprises a cell penetrating peptide, and wherein the cell penetrating peptide is directly or indirectly linked to the peptide or salt thereof.

32. The pharmaceutical composition of claim 1, wherein an amino acid of the peptide or salt thereof positioned at an end terminus comprises a side chain that can be at least partially deprotonated at a pH of about 7.3.

33. A nucleic acid at least partially encoding:
a peptide, having at least about 80% sequence identity to a polypeptide of SEQ ID NO:1-9489, and
wherein the peptide:
(i) modulates an expression level of a target protein implicated in a disease or condition, as measured by an at least partial increase or an at least partial decrease of a level of the target protein in an in vitro assay in a cell treated with the nucleic acid as determined by a Western blot relative to a level of the target protein in an otherwise comparable cell not treated with the nucleic acid;
(ii) produces an at least partial increase or an at least partial decrease of an activity of the target protein, as measured by a level of the activity of the target protein in a cell treated with the nucleic acid relative to a level of activity of the target protein in an otherwise comparable cell not treated with the nucleic acid in as determined by an in vitro assay;
(iii) produces an at least partial increase or an at least partial decrease of an activity of a protein downstream of the target protein in a cellular pathway in a cell treated with the nucleic acid relative to a level of activity of the protein downstream of the target protein in a cellular pathway in an otherwise comparable cell not treated with the nucleic acid as determined by an in vitro assay;
(iv) kills a cancer cell in an in vitro assay; or
(v) any combination thereof.

34. The nucleic acid of claim 33, wherein the peptide at least partially encoded by the nucleic acid does not comprise more than about 40 amino acids.

35. The nucleic acid of claim 33, wherein the nucleic acid is comprised in a pharmaceutical composition in unit dose form.

36. The nucleic acid of claim 33, wherein the peptide at least partially encoded by the nucleic acid comprises independently Gly, or an amino acid comprising a C₁-C₁₀ alkyl, a C₁-C₁₀ alkenyl, a C₁-C₁₀ alkynyl, a cycloalkyl, or an alkylcycloalkyl side chain.

37. The nucleic acid of claim 33, wherein the peptide at least partially encoded by the nucleic acid comprises an amino acid comprising an aromatic side chain.

38. The nucleic acid of claim 33, wherein the peptide at least partially encoded by the nucleic acid comprises an amino acid comprising a side chain that is at least partially protonated at a pH of about 7.3.

39. The nucleic acid of claim 33, wherein the peptide at least partially encoded by the nucleic acid comprises an amino acid comprising an amide containing side chain.

40. The nucleic acid of claim 33, wherein the peptide at least partially encoded by the nucleic acid comprises an amino acid comprising an alcohol or thiol containing side chain.

41. The nucleic acid of claim 33, wherein the peptide at least partially encoded by the nucleic acid comprises an amino acid comprising a side chain that is at least partially deprotonated at a pH of about 7.3.

42. The nucleic acid of claim 33, wherein the nucleic acid is double stranded.

43. The nucleic acid of claim 33, wherein the nucleic acid comprises DNA, RNA, or any combination thereof.

44. A vector that comprises the nucleic acid of any one of claims 33-43.

45. The vector of claim 44, wherein the vector comprises a polypeptide coat.

46. The vector of claim 44, wherein the vector comprises: a nanoparticle, a microparticle, a viral vector, a virus-like particle, a liposome, or any combination thereof.

47. The vector of claim 46, wherein the vector comprises the viral vector, and wherein the viral vector comprises an AAV vector.

48. The vector of claim 47, wherein the AAV vector is selected from the group consisting of: AAV1, AAV2, AAV3, AAV4, AAVS, AAV6, AAV7, AAV8, AAV9, AAV10, AAV11, AAV12, AAVDJ, and variants thereof.

49. An isolated peptide or salt thereof that comprises a sequence having at least about 80% sequence homology to any one of the peptides of SEQ ID NO:1-9489.

50. A kit that comprises the pharmaceutical composition of any one of claims 1-32, the nucleic acid of any one of claims 33-43, the vector of any one of claims 44-48, or the isolated peptide or salt thereof of claim 49; and a container.

51. A method of at least partially treating or preventing a disease or condition in a subject, the method comprising:
administering to the subject a therapeutically effective amount of:
(a) the pharmaceutical composition of any one of claims 1-32;
(b) the nucleic acid of any one of claims 33-43;
(c) the vector of any one of claims 44-48;
(d) the isolated peptide or salt thereof of claim 49; or
(e) any combination of (a)-(d), thereby at least partially preventing or treating the disease or condition in the subject.

52. The method of claim 51, wherein the method comprises the at least partially treating, and wherein the at least partially treating comprises ameliorating at least one symptom of the disease or condition.

53. The method of claim 51, wherein the method comprises the at least partially treating, and wherein the at least partially treating comprises reducing a growth of a tumor.

54. The method of claim 51, wherein the method comprises the at least partially treating, and wherein the at least partially treating comprises at least partially eliminating a tumor.

55. The method of claim 51, wherein the disease or condition comprises a cancer.

56. The method of claim 55, wherein the cancer comprises a sarcoma, a carcinoma, a melanoma, a lymphoma, a leukemia, a blastoma, a germ cell tumor, a myeloma, or any combination thereof.

57. The method of claim 51, wherein prior to treating, the subject has been diagnosed with cancer.

58. The method of claim 51, further comprising diagnosing the subject with cancer.

59. The method of claim 58, wherein the diagnosing comprises a physical examination, a biopsy, a radiological image, a blood test, a urine test, an antibody test, or any combination thereof.

60. The method of claim 59, wherein the diagnosing comprises the radiological image, and wherein the radiological image comprises: a computed tomography (CT) image, a nuclear scan, an X-Ray image, a magnetic resonance image (MRI), an ultrasound image, or any combination thereof.

61. The method of claim 51, wherein the administering is intra-arterial, intravenous, intramuscular, oral, topical, intranasal, subcutaneous, inhalation, catheterization, gastrostomy tube administration, intraosseous, ocular, otic, transdermal, rectal, nasal, intravaginal, intracavernous, transurethral, sublingual, or any combination thereof.

62. The method of claim 61, wherein the administering is performed at least about: 1 time per day, 2 times per day, 3 times per day, or 4 times per day.

63. The method of claim 61, wherein the administering is performed for about: 1 day to about 7 days, 1 week to about 5 weeks, 1 month to about 12 months, 1 year to about 3 years, 3 years to about 8 years, or 8 years to about 20 years.

64. The method of claim 51, further comprising administering a therapeutically effective amount of a second therapy, and wherein the administering of the second therapy is concurrent or consecutive to a) to e).

65. The method of claim 64, wherein the second therapy comprises surgery, chemotherapy, radiation therapy, immunotherapy, hormone therapy, a checkpoint inhibitor, targeted drug therapy, a gene editing therapy, an RNA editing therapy, a protein knockdown therapy, chimeric antigen receptor (CAR) T-cell therapy, or a combination thereof.

66. The method of claim 51, wherein the subject is a human.

67. The method of claim 66, wherein the human is from about 1 day to about 1 month old, from about 1 month to about 12 months old, from about 1 year to about 7 years old, from about 5 years to about 25 years old, from about 20 years to about 50 years old, from about 45 years to about 80 years old, or from about 75 years to about 130 years old.

68. A method of making the pharmaceutical composition of claim 1, wherein the method comprises contacting the peptide or salt thereof with a pharmaceutically acceptable excipient, diluent or carrier.

69. A method of at least partially reducing or at least partially increasing the activity of a target protein comprising:
(a) expressing a fragment of a gene in a target cell, wherein the gene fragment is expressed from a polynucleotide, wherein the gene fragment comprises at least a portion of the target protein and wherein the gene fragment is from about 60 nucleotides to about 150 nucleotides in length; and
(b) measuring the at least partial reduction or the at least partial increase of activity by determining a change of a level of activity of the target protein in a cell treated with the polynucleotide relative to a level of activity of the target protein in an otherwise comparable cell not treated with the polynucleotide an in vitro assay;
wherein the target protein is selected from a protein at least partially encoded by a gene or a variant thereof recited in Table 7.

70. A method of at least partially reducing or at least partially increasing activity of a protein downstream of a target protein in a cellular pathway comprising:
(a) expressing a fragment of a gene in a target cell, wherein the gene fragment is expressed from a polynucleotide, wherein the gene fragment comprises at least a portion of the target protein and wherein the gene fragment is from about 60 nucleotides to about 150 nucleotides in length; and
(b) measuring the at least partial reduction or the at least partial increase of activity by determining a change of a level of activity of the downstream protein of a cell treated with the polynucleotide relative to a level of activity of the downstream protein in an otherwise comparable cell not treated with the polynucleotide in an in vitro assay;
wherein the target protein is selected from a protein at least partially encoded by a gene or a variant thereof recited in Table 7.

71. The method of claim 69 or 70, wherein the fragment of a gene encodes for a peptide comprising a sequence having at least about 80% sequence homology to any one of the peptides of SEQ ID NO: 1-9489.

72. The method of claim 69 or 70, wherein the polynucleotide is comprised in a plasmid.

73. The method of any one of claims 69-72, wherein the polynucleotide or the plasmid is transfected into the target cell.

74. The method of any one of claims 69-73, wherein at least a portion of the target protein comprises about 20 amino acids to about 50 amino acids.

75. The method of claim 69 or 70, wherein the reduction of activity further comprises reduced cell growth.

76. A method of screening for at least partially reducing or at least partially increasing activity of a target protein, a protein downstream of a target protein in a cellular pathway, or both comprising:
(a) expressing one or more fragments of a gene in a target cell, wherein each gene fragment is expressed from a polynucleotide, wherein the one or more gene fragments comprise at least a portion of the target protein and wherein the gene fragment is from about 60 nucleotides to about 300 nucleotides in length; and
(b) measuring the at least partial reduction or the at least partial increase of activity by determining a change of a level of activity of the target protein in a cell treated with the polynucleotide relative to a level of activity of the target protein in an otherwise comparable cell not treated with the polynucleotide in an in vitro assay;
wherein the target protein is selected from a protein encoded by a gene or a variant thereof recited in Table 7.

77. The method of claim 76, wherein the fragment of a gene encodes for a peptide comprising a sequence having at least about 80% sequence homology to any one of peptides of SEQ ID Nos: 1-9489.

78. The method of claim 76 or 77, wherein the polynucleotide is comprised in a plasmid.

79. The method of any one of claims 76-78, wherein the polynucleotide or the plasmid is transfected into the target cell.

80. The method of any one of claims 76-79, wherein at least a portion of the target protein comprises about 20 amino acids to about 50 amino acids.

81. A composition comprising a peptide fragment, wherein the peptide fragment consists of 35-45 amino acids from a protein selected from the group consisting of AKT1, AR, ARAF, BRAF, CASP8, CCND1, CDH1, CDKN2A, CHEK2, CTNNB1, DDX3X, DICER1, EGFR, EP300, ERBB2, ERBB3, ERBB4, FBXW7, FGFR2, FGFR3, FLT3, GFP, GNA11, GNAQ, HPRT1, HRAS, IDH1, IDH2, KEAP1, KIT, KMT2C, KRAS, KRAS4B, MAP2K1, MAX, MDM2, MDM4, MET, MTOR, MYC, MYCL, MYCN, NCOA3, NFE2L2, NKX2, NOTCH1, NRAS, OMOMYC, PIK3CA, PIK3R1, PPP2R1A, PTPN11, RAB25, RAC1, RAF1, RASA1, RB1, RHEB, RHOA, RRAS2, RUNX1, SETD2, SF3B1, SKP2, SMAD2, SMAD4, SPOP, TERT, TGFBR2, TP53, VHL, YAP1, ZFP36L2, ACE1, ACE2, DPP4, DPP8, DPP9, ANPEP, FAP, and Fibronectin,
wherein the peptide fragment at least partially inhibits the biological activity of the protein from which it has greater than 98% identity and/or binds to a cognate of the protein.

82. The composition of claim 81, wherein the peptide fragment is identified by:
synthesizing a library of overlapping gene fragments from a gene that expresses the protein, wherein each gene fragment of the library of overlapping gene fragments has a unique nucleotide sequence, wherein each gene fragment has a sequence which partial overlaps with the sequences of least two or more gene fragments having nucleotide sequences from the gene;
pooling and cloning the gene fragments into vectors, wherein each vector overexpresses one gene fragment when transduced or transfected into a cell;
transfecting or transducing cells with the vectors comprising gene fragments, wherein each transduced or transfected cell has only one vector that comprises a gene fragment;
screening the transfected or transduced cells for cell growth over various time points;
sequencing and quantifying gene fragment abundance from each of the time points; and
mapping the sequenced gene fragments back to the gene that express the target protein and providing a depletion score for each codon, wherein the depletion score is defined as the mean depletion/enrichment of all overlapping sequenced gene fragments, and wherein codons of the gene fragments which have a depletion score below a p=0.05 significance threshold, indicates peptide sequences which inhibit functional regions of the protein expressed by the gene.

83. The composition of claim 81, wherein the peptide fragment consists essentially of or consists of a sequence of 35-45 amino acids selected from the group consisting of:
(a) a sequence of 35-40 amino acids located between amino acid 6 and 466 of SEQ ID NO:9540 and optionally wherein the peptide has a mutation as referenced to SEQ ID NO:9540 of 17K or 52R;
(b) a sequence of 35-40 amino acids of SEQ ID NO:9542;
(c) a sequence of 35-40 amino acids of SEQ ID NO:9544;
(d) a sequence of 35-40 amino acids of SEQ ID NO:9546 and optionally wherein the peptide has a mutation as referenced to SEQ ID NO:9546 of 464V, 466E, 467L, 468C, 469A/R, 568D, 575K, 581I, 594G/N, 596D/S, 597Q/V, and/or 600E;
(e) a sequence of 35-40 amino acids of SEQ ID NO:9548 and optionally wherein the peptide has a mutation as referenced to SEQ ID NO:9548 of 363D, and/or 367G;
(f) a sequence of 35-40 amino acids of SEQ ID NO:9550;
(g) a sequence of 35-40 amino acids of SEQ ID NO:9552 and optionally wherein the peptide has a mutation as referenced to SEQ ID NO:9552 of 222G, 257G/N, and/or 290G;
(h) a sequence of 35-40 amino acids of SEQ ID NO:9554 and optionally wherein the peptide has a mutation as referenced to SEQ ID NO:9554 of 118T and/or 84Y;
(i) a sequence of 35-40 amino acids of SEQ ID NO:9556 and optionally wherein the peptide has a mutation as referenced to SEQ ID NO:9556 of 381R, 388L/Y, 389H, 415F, and/or 452G;
(j) a sequence of 35-40 amino acids of SEQ ID NO:9558 and optionally wherein the peptide has a mutation as referenced to SEQ ID NO:9558 of 32V, 34R, 333F, 334K, 335T, 383C/G, 386G, 387I/K/Y, and/or 426D;
(k) a sequence of 35-40 amino acids of SEQ ID NO:9560 and optionally wherein the peptide has a mutation as referenced to SEQ ID NO:9560 of 528C and/or 532A/M;
(l) a sequence of 35-40 amino acids of SEQ ID NO:9562 and optionally wherein the peptide has a mutation as referenced to SEQ ID NO:9562 of 1703S, 1705K, 1709N, 1806N, 1809R, 1810Y/V, and/or 1813D/G;
(m) a sequence of 35-40 amino acids of SEQ ID NO:9564 and optionally wherein the peptide has a mutation as referenced to SEQ ID NO:9564 of 85M, 108G/K, 252C, 270C, 289T/V, 596R/S, 598V, 628F, 719C/D, 724S, 759N, 836H, 858R, 861Q, and/or 891C;
(n) a sequence of 35-40 amino acids of SEQ ID NO:9566 and optionally wherein the peptide has a mutation as referenced to SEQ ID NO:9566 of 1397D, 1398P, 1399N, 1400I, 1414C/D, 1446C, and/or 1451P;
(o) a sequence of 35-40 amino acids of SEQ ID NO:9568 and optionally wherein the peptide has a mutation as referenced to SEQ ID NO:9568 of 310F and/or 755M/S;
(p) a sequence of 35-40 amino acids of SEQ ID NO:9570 and optionally wherein the peptide has a mutation as referenced to SEQ ID NO:9570 of 103H and/or 232V;
(q) a sequence of 35-40 amino acids of SEQ ID NO:9572 and optionally wherein the peptide has a mutation as referenced to SEQ ID NO:9572 of 785R/V;
(r) a sequence of 35-40 amino acids of SEQ ID NO:9574 and optionally wherein the peptide has a mutation as referenced to SEQ ID NO:9574 of 426L, 465C/H, 479Q, 502V, 505G/L, 516N/R, 517E/R, 520N, and/or 545C;
(s) a sequence of 35-40 amino acids of SEQ ID NO:9576 and optionally wherein the peptide has a mutation as referenced to SEQ ID NO:9576 of 251Q and/or 545Q;
(t) a sequence of 35-40 amino acids of SEQ ID NO:9578 and optionally wherein the peptide has a mutation as referenced to SEQ ID NO:9578 of 248C and/or 249C;
(u) a sequence of 35-40 amino acids of SEQ ID NO:9580 and optionally wherein the peptide has a mutation as referenced to SEQ ID NO:9580 of 617E and/or 618L;
(v) a sequence of 35-40 amino acids of SEQ ID NO:9582;
(w) a sequence of 35-40 amino acids of SEQ ID NO:9584 and optionally wherein the peptide has a mutation as referenced to SEQ ID NO:9584 of 183C and/or 209H;
(x) a sequence of 35-40 amino acids of SEQ ID NO:9586 and optionally wherein the peptide has a mutation as referenced to SEQ ID NO:9586 of 48V, 209P, and/or 247G;
(y) a sequence of 35-40 amino acids of SEQ ID NO:9588;
(z) a sequence of 35-40 amino acids of SEQ ID NO:9590 and optionally wherein the peptide has a mutation as referenced to SEQ ID NO:9590 of 12V, 13R/V, 59T, 60S/V, 61K/L, and/or 117N/R;
(aa) a sequence of 35-40 amino acids of SEQ ID NO:9592 and optionally wherein the peptide has a mutation as referenced to SEQ ID NO:9592 of 132C/H;
(bb) a sequence of 35-40 amino acids of SEQ ID NO:9594 and optionally wherein the peptide has a mutation as referenced to SEQ ID NO:9594 of 137E, 140Q, and/or 172G/K/S;
(cc) a sequence of 35-40 amino acids of SEQ ID NO:9596 and optionally wherein the peptide has a mutation as referenced to SEQ ID NO:9596 of 152A, 333D/S, 413H, 477S, 483C, 524C, 525C, and/or 571D;
(dd) a sequence of 35-40 amino acids of SEQ ID NO:9598 and optionally wherein the peptide has a mutation as referenced to SEQ ID NO:9598 of 559G, 573Q, 576P, 636V, 637H, 642E, 812V, and/or 816V/Y;
(ee) a sequence of 35-40 amino acids of SEQ ID NO:9600 and optionally wherein the peptide has a mutation as referenced to SEQ ID NO:9600 of 370Y and/or 385Y;
(ff) a sequence of 35-40 amino acids of SEQ ID NO:9602 and optionally wherein the peptide has a mutation as referenced to SEQ ID NO:9602 of 12R/V, 14I, 19F, 20R, 21R, 34L, 59G/T, 61K/R, 62K, 63K, and/or 117N;
(gg) a sequence of 35-40 amino acids of SEQ ID NO:9604;
(hh) a sequence of 35-40 amino acids of SEQ ID NO:9606 and optionally wherein the peptide has a mutation as referenced to SEQ ID NO:9606 of 121R, 124L/S and/or 130C;
(ii) a sequence of 35-40 amino acids of SEQ ID NO:9608;
(jj) a sequence of 35-40 amino acids of SEQ ID NO:9610;
(kk) a sequence of 35-40 amino acids of SEQ ID NO:9612;
(11) a sequence of 35-40 amino acids of SEQ ID NO:9614 and optionally wherein the peptide has a mutation as referenced to SEQ ID NO:9614 of 1110I, 1246H, and/or 1248C/H;
(mm) a sequence of 35-40 amino acids of SEQ ID NO:9616 and optionally wherein the peptide has a mutation as referenced to SEQ ID NO:9616 of 1977R, 1981E, 2215F, 2230V, and/or 2406A/M;
(nn) a sequence of 35-40 amino acids of SEQ ID NO:9618;
(oo) a sequence of 35-40 amino acids of SEQ ID NO:9620;
(pp) a sequence of 35-40 amino acids of SEQ ID NO:9622;
(qq) a sequence of 35-40 amino acids of SEQ ID NO:9624;
(rr) a sequence of 35-40 amino acids of SEQ ID NO:9626 and optionally wherein the peptide has a mutation as referenced to SEQ ID NO:9626 of 77G, 79G/Q, 80A/I, 81S/V, and/or 82D/V;
(ss) a sequence of 35-40 amino acids of SEQ ID NO:9628;
(tt) a sequence of 35-40 amino acids of SEQ ID NO:9630 and optionally wherein the peptide has a mutation as referenced to SEQ ID NO:9630 of 440R and/or 449Y;
(uu) a sequence of 35-40 amino acids of SEQ ID NO:9632 and optionally wherein the peptide has a mutation as referenced to SEQ ID NO:9632 of 12D, 13D/R, 16N, 61H/K/R, and/or 62K;
(vv) a sequence of 35-40 amino acids of SEQ ID NO:9634;
(ww) a sequence of 35-40 amino acids of SEQ ID NO:9636 and optionally wherein the peptide has a mutation as referenced to SEQ ID NO:9636 of 344G/M, 345I/Y, 365V, 420R, 471L, 539R, 545A/K, 546R, and/or 956F;
(xx) a sequence of 35-40 amino acids of SEQ ID NO:9638 and optionally wherein the peptide has a mutation as referenced to SEQ ID NO:9638 of 375W, 376R, 379E/N, 557P, 560G/Y, 565R, 567E, and/or 568T;
(yy) a sequence of 35-40 amino acids of SEQ ID NO:9640 and optionally wherein the peptide has a mutation as referenced to SEQ ID NO:9640 of 144C, 179R, 182W, 183Q/W, 217K/R, 220M, 256Y, 257C, 258C/H and/or 260G;
(zz) a sequence of 35-40 amino acids of SEQ ID NO:9642 and optionally wherein the peptide has a mutation as referenced to SEQ ID NO:9642 of 60V, 71L, 72D, 76A/K, 279C, 282M, 461G/T, 498W, 503V, 5041, 507K, and/or 510H/L;
(aaa) a sequence of 35-40 amino acids of SEQ ID NO:9644;
(bbb) a sequence of 35-40 amino acids of SEQ ID NO:9646 and optionally wherein the peptide has a mutation as referenced to SEQ ID NO:9646 of 15S, 18Y, 29L/S, 61R, 68H, 135N, 178V;
(ccc) a sequence of 35-40 amino acids of SEQ ID NO:9648;
(ddd) a sequence of 35-40 amino acids of SEQ ID NO:9650 and optionally wherein the peptide has a mutation as referenced to SEQ ID NO:9650 of 789L;
(eee) a sequence of 35-40 amino acids of SEQ ID NO:9652 and optionally wherein the peptide has a mutation as referenced to SEQ ID NO:9652 of 563S;
(fff) a sequence of 35-40 amino acids of SEQ ID NO:9654 and optionally wherein the peptide has a mutation as referenced to SEQ ID NO:9654 of 60V;
(ggg) a sequence of 35-40 amino acids of SEQ ID NO:9656 and optionally wherein the peptide has a mutation as referenced to SEQ ID NO:9656 of 17A, 22R, 371, 42C, 47K, 59G/Y, 60K, 61D, 62E/R, 63K, 70S, 73P, and/or 161T/V;
(hhh) a sequence of 35-40 amino acids of SEQ ID NO:9658 and optionally wherein the peptide has a mutation as referenced to SEQ ID NO:9658 of 72H/L;
(iii) a sequence of 35-40 amino acids of SEQ ID NO:9660 and optionally wherein the peptide has a mutation as referenced to SEQ ID NO:9660 of 107L and/or 110N;
(jjj) a sequence of 35-40 amino acids of SEQ ID NO:9662 and optionally wherein the peptide has a mutation as referenced to SEQ ID NO:9662 of 1543Q, 1603R, 1625C/L, and/or 1628T;
(kkk) a sequence of 35-40 amino acids of SEQ ID NO:9664 and optionally wherein the peptide has a mutation as referenced to SEQ ID NO:9664 of 622Q, 625C/H, 626Y, 662R, 663P, 666E/N/T, 700E, 741E, 746V, 862K, 902G/K, and/or 903P;
(lll) a sequence of 35-40 amino acids of SEQ ID NO:9666;
(mmm) a sequence of 35-40 amino acids of SEQ ID NO:9668 and optionally wherein the peptide has a mutation as referenced to SEQ ID NO:9668 of 450E/N;
(nnn) a sequence of 35-40 amino acids of SEQ ID NO:9670 and optionally wherein the peptide has a mutation as referenced to SEQ ID NO:9670 of 339L, 351G/H, 352R/V, 353C/N, 355V/Y, 356L/S, 361C/H, 363S, 365D/R, 366K, 368C, 382D, 383R, 384D, 3865/V, 406V, 408L, 504R, 507N, 509G, 523W, and/or 524L/R;
(oo0) a sequence of 35-40 amino acids of SEQ ID NO:9672 and optionally wherein the peptide has a mutation as referenced to SEQ ID NO:9672 of 87N and/or 131G;
(ppp) a sequence of 35-40 amino acids of SEQ ID NO:9674;
(qqq) a sequence of 35-40 amino acids of SEQ ID NO:9676 and optionally wherein the peptide has a mutation as referenced to SEQ ID NO:9676 of 553H;
(rrr) a sequence of 35-40 amino acids of SEQ ID NO:9678 and optionally wherein the peptide has a mutation as referenced to SEQ ID NO:9678 of 105C/V, 1095/V, 110P, 111R, 113V, 120E, 121Y, 125M/P, 126D/S, 127P/Y, 130R/V, 1311, 132E/N, 134L, 135R, 136E/H, 137Q, 138T/V, 141R/Y, 143A/M, 144H/P, 145P, 147G, 151S/H, 152L/S, 155P, 156P, 157D, 158S, 159P, 161D/T, 162F/N, 163C/H, 164E, 171K, 172D/F, 173G/L, 176F/R, 177R/S, 178Q, 179D/Q/R, 180K, 181C/H, 190L, 192R, 193N/R, 194F/H, 195F/M/N, 196P, 197G/L, 205N/S, 208G, 211I, 213L, 214R, 215G/I, 216E/L, 218E, 220C/H, 230P, 232S, 234C/H, 236C/H, 237I/K/V, 238R/W/Y, 239D, 240R, 241F/P, 2425/Y, 2431, 244D/S, 245D/S, 246T/V, 2471, 248Q/W, 249G/M/S, 250R, 251F/N, 253A, 254S, 255T, 2561, 257R, 258D/G/K, 259V/Y, 262V, 265P, 266R/V, 267Q/W, 270S/V, 271K/V, 272G/M, 273C/H, 274G/L, 275G/Y, 276G/P, 277G/Y, 278R/S, 279E/R, 280K/S, 281E/H/V, 282Q/W, 283P, 284P, 285K/V, 286G/Q, 332F, 334V/W, 337H/S, and/or 348F/S;
(sss) a sequence of 35-40 amino acids of SEQ ID NO:9680 and optionally wherein the peptide has a mutation as referenced to SEQ ID NO:9680 of 79G, 80R, 82P, 89H, 115N, 117C, 118P, 120G, 128H, 130D/F, 131Y, 136V, 151F/N, 153P, 158R/V, 161Q, 162R, 165D, 178P, 184P, and/or 188P;
(ttt) a sequence of 35-40 amino acids of SEQ ID NO:9682;
(uuu) a sequence of 35-40 amino acids of SEQ ID NO:9684 and optionally wherein the peptide has a mutation as referenced to SEQ ID NO:9684 of 159Y;
(vvv) a sequence of 35-40 amino acids of SEQ ID NO:9688;
(www) a sequence of 35-40 amino acids of SEQ ID NO:9686;
(xxx) a sequence of 35-40 amino acids of SEQ ID NO:9696
(yyy) a sequence of 35-40 amino acids of SEQ ID NO:9700;
(zzz) a sequence of 35-40 amino acids of SEQ ID NO:9690;
(aaaa) a sequence of 35-40 amino acids of SEQ ID NO:9692;
(bbbb) a sequence of 35-40 amino acids of SEQ ID NO:9694; and
(cccc) a sequence of 35-40 amino acids of SEQ ID NO:9698.

84. The composition of claim 83, wherein the peptide of (a) has the sequence selected from the group consisting of SEQ ID NO:1-5, 5000-5009 and 5010.

85. The composition of claim 83, wherein the peptide of (b) has the sequence selected from the group consisting of SEQ ID NO: 3499, 3750-3759, 5011-5072 and 5073.

86. The composition of claim 83, wherein the peptide of (c) has the sequence selected from the group consisting of SEQ ID NO: 5074-5083 and 5084.

87. The composition of claim 83, wherein the peptide of (d) has the sequence selected from the group consisting of SEQ ID NO: 6-15, 350-489, 2555-2586, 2949-2974, 3500-3509, 3760-3792, 5086-5184 and 5185.

88. The composition of claim 83, wherein the peptide of (e) has the sequence selected from the group consisting of SEQ ID NO: 490-498, 2587-2588, 2975-2981, 3511, 3793-3804, 5186-5227 and 5228.

89. The composition of claim 83, wherein the peptide of (f) has the sequence selected from the group consisting of SEQ ID NO: 5229-5249 and 5250.

90. The composition of claim 83, wherein the peptide of (g) has the sequence selected from the group consisting of SEQ ID NO: 499-514, 2589-2591, 2982, 3511, 3805-3816, 5251-5309 and 5310.

91. The composition of claim 83, wherein the peptide of (h) has the sequence selected from the group consisting of SEQ ID NO: 515-516 and 517.

92. The composition of claim 83, wherein the peptide of (i) has the sequence selected from the group consisting of SEQ ID NO: 518-592, 2592-2609, 2983-3009, 3443-3444, 3512-3514, 3817-3859, 5311-5449 and 5450.

93. The composition of claim 83, wherein the peptide of (j) has the sequence selected from the group consisting of SEQ ID NO: 16-27, 593-636, 2610-2629, 3010-3039, 3860-3862, 5451-5501 and 5502.

94. The composition of claim 83, wherein the peptide of (k) has the sequence selected from the group consisting of SEQ ID NO: 637-645, 2630-2634, 3040-3042, 3863-3878, 5503-5581 and 5582.

95. The composition of claim 83, wherein the peptide of (1) has the sequence selected from the group consisting of SEQ ID NO: 28-32, 646-671, 2635-2639, 3043-3059, 3445-3447, 3515-3532, 3879-3941, 5583-5862 and 5863.

96. The composition of claim 83, wherein the peptide of (m) has the sequence selected from the group consisting of SEQ ID NO: 33-49, 672-725, 2640-2655, 3060-3082, 3448, 3533-3536, 3942-3973, 5864-5933 and 5934.

97. The composition of claim 83, wherein the peptide of (n) has the sequence selected from the group consisting of SEQ ID NO: 50-59, 726-736, 2656-2660, 3083-3104 and 3105.

98. The composition of claim 83, wherein the peptide of (o) has the sequence selected from the group consisting of SEQ ID NO: 60, 737-742, 2661-2662, 3106-3107, 3537-3538, 3974-3985, 5935-5979 and 5980.

99. The composition of claim 83, wherein the peptide of (p) has the sequence selected from the group consisting of SEQ ID NO: 743-745, 3539-3544, 3986-3998, 5981-6063 and 6064.

100. The composition of claim 83, wherein the peptide of (q) has the sequence selected from the group consisting of SEQ ID NO: 746-751, 2663, 3108-3110, 3449-3451, 3545-3548, 3999-4047, 6065-6179 and 6180.

101. The composition of claim 83, wherein the peptide of (r) has the sequence selected from the group consisting of SEQ ID NO: 752-812, 2664-2668, 3111-3125, 3549, 4048-4061, 6181-6250 and 6251.

102. The composition of claim 83, wherein the peptide of (s) has the sequence selected from the group consisting of SEQ ID NO: 813-819, 2669-2671, 3126-3130, 4062-4075, 6252-6309 and 6310.

103. The composition of claim 83, wherein the peptide of (t) has the sequence selected from the group consisting of SEQ ID NO: 820-824, 6311-6322 and 6323.

104. The composition of claim 83, wherein the peptide of (u) has the sequence selected from the group consisting of SEQ ID NO: 825-855, 2672-2678, 3131, 3550-3572, 4076-4106, 6324-6470 and 6471.

105. The composition of claim 83, wherein the peptide of (v) has the sequence selected from the group consisting of SEQ ID NO: 856-857 and 858.

106. The composition of claim 83, wherein the peptide of (w) has the sequence selected from the group consisting of SEQ ID NO: 859-863, 3132, 4107, 6472-6480 and 6481.

107. The composition of claim 83, wherein the peptide of (x) has the sequence selected from the group consisting of SEQ ID NO: 61-63, 864-866, 2679-2682, 3133-3136, 6482-6509 and 6510.

108. The composition of claim 83, wherein the peptide of (y) has the sequence selected from the group consisting of SEQ ID NO: 64-65, 867-875, 2683, 3137-3146, 4108, 6511-6524 and 6525.

109. The composition of claim 83, wherein the peptide of (z) has the sequence selected from the group consisting of SEQ ID NO: 876-894, 2684, 3147-3149, 6526 and 6527.

110. The composition of claim 83, wherein the peptide of (aa) has the sequence selected from the group consisting of SEQ ID NO: 895-905, 3150-3152, 4109, 6528-6556 and 6557.

111. The composition of claim 83, wherein the peptide of (bb) has the sequence selected from the group consisting of SEQ ID NO: 66-69, 899-905, 4110-4111, 6558-6570 and 6571.

112. The composition of claim 83, wherein the peptide of (cc) has the sequence selected from the group consisting of SEQ ID NO: 906-921, 2685, 3153-3156, 4112, 6572-6581 and 6582.

113. The composition of claim 83, wherein the peptide of (dd) has the sequence selected from the group consisting of SEQ ID NO: 70-73, 922-950, 2686-2703, 3157-3184, 3573-3574, 4113-4127, 6583-6706 and 6707.

114. The composition of claim 83, wherein the peptide of (ee) has the sequence selected from the group consisting of SEQ ID NO: 951-961, and 3185.

115. The composition of claim 83, wherein the peptide of (ff) has the sequence selected from the group consisting of SEQ ID NO: 962-1052, 2704-2721, 3186-3198, 3452, 3575-3579, 4128-4158, 6708-6752 and 6753.

116. The composition of claim 83, wherein the peptide of (gg) has the sequence selected from the group consisting of SEQ ID NO: 4159-4167, 6754-6804 and 6805.

117. The composition of claim 83, wherein the peptide of (hh) has the sequence selected from the group consisting of SEQ ID NO: 74, 1053-1059, 2722, 3199-3202, 3580, 4168-4180, 6806-6847 and 6848.

118. The composition of claim 83, wherein the peptide of (ii) has the sequence selected from the group consisting of SEQ ID NO: 6849-6850 and 6851.

119. The composition of claim 83, wherein the peptide of (jj) has the sequence selected from the group consisting of SEQ ID NO: 3453-3455, 3581-3588, 4181-4221, 6852-6938 and 6939.

120. The composition of claim 83, wherein the peptide of (kk) has the sequence selected from the group consisting of SEQ ID NO: 3589-3595, 4222-4262, 6940-7051 and 7052.

121. The composition of claim 83, wherein the peptide of (ll) has the sequence selected from the group consisting of SEQ ID NO: 75, 1060-1071, 2723-2729, 3203-3216, 3456-3457, 3596-3600, 4263-4297, 7053-7272 and 7273.

122. The composition of claim 83, wherein the peptide of (mm) has the sequence selected from the group consisting of SEQ ID NO: 76-77, 1072-1080, 3458, 3601, 4298-4311, 7274-7378 and 7379.

123. The composition of claim 83, wherein the peptide of (nn) has the sequence selected from the group consisting of SEQ ID NO: 4312-4317, 7380-7408 ad 7409.

124. The composition of claim 83, wherein the peptide of (oo) has the sequence selected from the group consisting of SEQ ID NO: 4318, 7410-7425 and 7426.

125. The composition of claim 83, wherein the peptide of (pp) has the sequence selected from the group consisting of SEQ ID NO: 3602, 4319-4327, 7427-7452 and 7453.

126. The composition of claim 83, wherein the peptide of (qq) has the sequence selected from the group consisting of SEQ ID NO: 3603, 4328-4378, 7454-7617 and 7618.

127. The composition of claim 83, wherein the peptide of (rr) has the sequence selected from the group consisting of SEQ ID NO: 1081-1183, 2730-2740, 3217-3221, 3459-3460, 3604-3634, 4379-4430, 7619-7693 and 7694.

128. The composition of claim 83, wherein the peptide of (ss) has the sequence selected from the group consisting of SEQ ID NO: 4431-4435, 7695-7711 and 7712.

129. The composition of claim 83, wherein the peptide of (tt) has the sequence selected from the group consisting of SEQ ID NO: 1184-1187, 4436, 7713-7751 and 7752.

130. The composition of claim 83, wherein the peptide of (uu) has the sequence selected from the group consisting of SEQ ID NO: 1188-1197, 2741-2747, 3222-3225, 4437-4444, 7753-7770 and 7771.

131. The composition of claim 83, wherein the peptide of (vv) has the sequence selected from the group consisting of SEQ ID NO: 4445-4447, 7772-7781 and 7782.

132. The composition of claim 83, wherein the peptide of (ww) has the sequence selected from the group consisting of SEQ ID NO: 78-111, 1198-1273, 2748-2788, 3226-3254, 3461-3463, 3635-3650, 4448-4565, 7783-8034 and 8035.

133. The composition of claim 83, wherein the peptide of (xx) has the sequence selected from the group consisting of SEQ ID NO: 112-151, 1274-1308, 2789-2825, 3255-3279, 3651-3655, 4566-4608, 8036-8179 and 8180.

134. The composition of claim 83, wherein the peptide of (yy) has the sequence selected from the group consisting of SEQ ID NO: 152-153, 1309-1329, 2826, 3280-3287, 3656, 8181-8200 and 8201.

135. The composition of claim 83, wherein the peptide of (zz) has the sequence selected from the group consisting of SEQ ID NO: 154-171, 1330-1385, 2827-2840, 3288-3301, 3464, 3657, 4609-4626, 8202-8309 and 8310.

136. The composition of claim 83, wherein the peptide of (aaa) has the sequence selected from the group consisting of SEQ ID NO: 4627, 8311-8212 and 8313.

137. The composition of claim 83, wherein the peptide of (bbb) has the sequence selected from the group consisting of SEQ ID NO: 172, 1386-1412, 2841-2845, 3302-3313, 3658-3661, 4628-4640, 8314-8338 and 8339.

138. The composition of claim 83, wherein the peptide of (ccc) has the sequence selected from the group consisting of SEQ ID NO: 3465-3467, 4641-4654, 8340-83402 and 8403.

139. The composition of claim 83, wherein the peptide of (ddd) has the sequence selected from the group consisting of SEQ ID NO: 1413-1417, 3314, 3468-3491, 3662-3674, 4655-4738, 8404-8619 and 8620.

140. The composition of claim 83, wherein the peptide of (eee) has the sequence selected from the group consisting of SEQ ID NO: 1418-1424, 2846-2856, 3315-3321, 3492-3494, 3675-3713, 4739-4823, 8621-8860 and 8861.

141. The composition of claim 83, wherein the peptide of (fff) has the sequence selected from the group consisting of SEQ ID NO: 1425-1432, 2857-2858, 3322-3329, 4824-4829, 8862-8900 and 8901.

142. The composition of claim 83, wherein the peptide of (ggg) has the sequence selected from the group consisting of SEQ ID NO: 173-175, 1433-1508, 2859-2872, 3330-3384, 4830-4833, 8902-8923 and 8924.

143. The composition of claim 83, wherein the peptide of (hhh) has the sequence selected from the group consisting of SEQ ID NO: 1509-1514, 3495, 3714-3725, 4834-4845, 8925-8948 and 8949.

144. The composition of claim 83, wherein the peptide of (iii) has the sequence selected from the group consisting of SEQ ID NO: 1515-1518, 2873, 4846-4850, 8950-8965 and 8966.

145. The composition of claim 83, wherein the peptide of (jjj) has the sequence selected from the group consisting of SEQ ID NO: 176-179, 1519-1532, 2874-2878, 3385-3392 and 3393.

146. The composition of claim 83, wherein the peptide of (kkk) has the sequence selected from the group consisting of SEQ ID NO: 180-204, 1533-1589, 2879-2891, 3394-3410, 3496-3498, 3726-3731, 4851-4922, 8967-9147 and 9148.

147. The composition of claim 83, wherein the peptide of (lll) has the sequence selected from the group consisting of SEQ ID NO: 4923-4931, 9149-9181 and 9182.

148. The composition of claim 83, wherein the peptide of (mmm) has the sequence selected from the group consisting of SEQ ID NO: 1590-1591, 2892, 3732-3733, 4932-4937, 9183-9227 and 9228

149. The composition of claim 83, wherein the peptide of (nnn) has the sequence selected from the group consisting of SEQ ID NO: 205-207, 1592-1795, 2893-2911, 3411-3426, 3734-3745, 4938-4959, 9229-9287 and 9288.

150. The composition of claim 83, wherein the peptide of (ooo) has the sequence selected from the group consisting of SEQ ID NO: 208, 1796-1804, 2912-2913, and 3427.

151. The composition of claim 83, wherein the peptide of (ppp) has the sequence selected from the group consisting of SEQ ID NO: 4960-4976, 9289-9389 and 9390.

152. The composition of claim 83, wherein the peptide of (qqq) has the sequence selected from the group consisting of SEQ ID NO: 1805, 3746-3749, 4977-4988, 9391-9416 and 9417.

153. The composition of claim 83, wherein the peptide of (rrr) has the sequence selected from the group consisting of SEQ ID NO: 209-341, 1806-2482, 2914-2943, 3428-3439, 4989-4990, 9418-9431 and 9432.

154. The composition of claim 83, wherein the peptide of (sss) has the sequence selected from the group consisting of SEQ ID NO: 342-349, 2483-2553, 2944-2948, 3440-3442, 4991-4997, 9433-9439 and 9440.

155. The composition of claim 83, wherein the peptide of (ttt) has the sequence selected from the group consisting of SEQ ID NO: 4998-4999, 9441-9458 and 9459.

156. The composition of claim 83, wherein the peptide of (uuu) has the sequence of SEQ ID NO:2554.

157. The composition of claim 83, wherein the peptide of (vvv) has the sequence selected from the group consisting of SEQ ID NO: 9471-9472, and 9489.

158. The composition of claim 83, wherein the peptide of (www) has the sequence selected from the group consisting of SEQ ID NO: 9460-9469 and 9470.

159. The composition of claim 83, wherein the peptide of (xxx) has the sequence selected from the group consisting of SEQ ID NO: 9479-9480, and 9483.

160. The composition of claim 83, wherein the peptide of (yyy) has the sequence of SEQ ID NO:9487.

161. The composition of claim 83, wherein the peptide of (zzz) has the sequence selected from the group consisting of SEQ ID NO: 9473-9474, and 9488.

162. The composition of claim 83, wherein the peptide of (aaaa) has the sequence selected from the group consisting of SEQ ID NO: 9475-9476, and 9486.

163. The composition of claim 83, wherein the peptide of (bbbb) has the sequence selected from the group consisting of SEQ ID NO: 9477-9478, and 9485.

164. The composition of claim 83, wherein the peptide of (cccc) has the sequence selected from the group consisting of SEQ ID NO: 9481-9482, and 9484.

165. The composition of any one of claims 81-164, wherein the peptide fragment is fused to a delivery peptide.

166. The composition of claim 165, wherein the delivery peptide comprises a targeting peptide.

167. The composition of claim 166, wherein the peptide fragment further comprises a cell penetrating peptide (CPP).

168. The composition of claim 165, wherein the delivery peptide comprises a cell penetrating peptide (CPP).

169. The composition of claim 167 or 168, wherein the CPP is linked to the N-terminus or C-terminus of the peptide fragment.

170. The composition of claim 168, further comprising a peptide linker between the CPP and the peptide fragment.

171. A composition of any one of claims 81-164, wherein the peptide fragment is linked to a nanoparticle.

172. An isolated polynucleotide encoding a peptide fragment of the composition of any one of claim 81-164.

173. A vector comprising the polynucleotide of claim 172.

174. The vector of claim 173, wherein the vector is a viral vector.

175. The vector of claim 174, wherein the viral vector is replication competent.

176. The vector of claim 174, wherein the viral vector is replication defective.

177. The vector of claim 174, wherein the vector is engineered from an adeno-viral vector, a lenti-viral vector or a gamma-viral vector.

178. A recombinant cell containing a polynucleotide of claim 172.

179. A recombinant cell containing a vector of claim 173.

180. A method of treating a cancer in a subject, comprising administering a composition of claim 83 and any one or more of (a)-(uuu), wherein a peptide (a)-(uuu) has a dominant-negative effect and inhibits cancer growth, invasiveness or migration.

181. The method of claim 180, wherein the cancer is selected from the group consisting of: adrenocortical carcinoma, AIDS-related cancers, AIDS-related lymphoma, anal cancer, anorectal cancer, cancer of the anal canal, appendix cancer, childhood cerebellar astrocytoma, childhood cerebral astrocytoma, basal cell carcinoma, skin cancer (non-melanoma), biliary cancer, extrahepatic bile duct cancer, intrahepatic bile duct cancer, bladder cancer, urinary bladder cancer, bone and joint cancer, osteosarcoma and malignant fibrous histiocytoma, brain cancer, brain tumor, brain stem glioma, cerebellar astrocytoma, cerebral astrocytoma/malignant glioma, ependymoma, medulloblastoma, supratentorial primitive neuroectodermal tumors, visual pathway and hypothalamic glioma, breast cancer, including triple negative breast cancer, bronchial adenomas/carcinoids, carcinoid tumor, gastrointestinal, nervous system cancer, nervous system lymphoma, central nervous system cancer, central nervous system lymphoma, cervical cancer, childhood cancers, chronic lymphocytic leukemia, chronic myelogenous leukemia, chronic myeloproliferative disorders, colon cancer, colorectal cancer, cutaneous T-cell lymphoma, lymphoid neoplasm, mycosis fungoides, Seziary Syndrome, endometrial cancer, esophageal cancer, extracranial germ cell tumor, extragonadal germ cell tumor, extrahepatic bile duct cancer, eye cancer, intraocular melanoma, retinoblastoma, gallbladder cancer, gastric (stomach) cancer, gastrointestinal carcinoid tumor, gastrointestinal stromal tumor (GIST), germ cell tumor, ovarian germ cell tumor, gestational trophoblastic tumor glioma, head and neck cancer, hepatocellular (liver) cancer, Hodgkin lymphoma, hypopharyngeal cancer, intraocular melanoma, ocular cancer, islet cell tumors (endocrine pancreas), Kaposi Sarcoma, kidney cancer, renal cancer, laryngeal cancer, acute lymphoblastic leukemia, acute myeloid leukemia, chronic lymphocytic leukemia, chronic myelogenous leukemia, hairy cell leukemia, lip and oral cavity cancer, liver cancer, lung cancer, non-small cell lung cancer, small cell lung cancer, AIDS-related lymphoma, non-Hodgkin lymphoma, primary central nervous system lymphoma, Waldenstram macroglobulinemia, medulloblastoma, melanoma, intraocular (eye) melanoma, merkel cell carcinoma, mesothelioma malignant, mesothelioma, metastatic squamous neck cancer, mouth cancer, cancer of the tongue, multiple endocrine neoplasia syndrome, mycosis fungoides, myelodysplastic syndromes, myelodysplastic/myeloproliferative diseases, chronic myelogenous leukemia, acute myeloid leukemia, multiple myeloma, chronic myeloproliferative disorders, nasopharyngeal cancer, neuroblastoma, oral cancer, oral cavity cancer, oropharyngeal cancer, ovarian cancer, ovarian epithelial cancer, ovarian low malignant potential tumor, pancreatic cancer, islet cell pancreatic cancer, paranasal sinus and nasal cavity cancer, parathyroid cancer, penile cancer, pharyngeal cancer, pheochromocytoma, pineoblastoma and supratentorial primitive neuroectodermal tumors, pituitary tumor, plasma cell neoplasm/multiple myeloma, pleuropulmonary blastoma, prostate cancer, rectal cancer, renal pelvis and ureter, transitional cell cancer, retinoblastoma, rhabdomyosarcoma, salivary gland cancer, ewing family of sarcoma tumors, soft tissue sarcoma, uterine cancer, uterine sarcoma, skin cancer (non-melanoma), skin cancer (melanoma), papillomas, actinic keratosis and keratoacanthomas, merkel cell skin carcinoma, small intestine cancer, soft tissue sarcoma, squamous cell carcinoma, stomach (gastric) cancer, supratentorial primitive neuroectodermal tumors, testicular cancer, throat cancer, thymoma, thymoma and thymic carcinoma, thyroid cancer, transitional cell cancer of the renal pelvis and ureter and other urinary organs, gestational trophoblastic tumor, urethral cancer, endometrial uterine cancer, uterine sarcoma, uterine corpus cancer, vaginal cancer, vulvar cancer, and Wilm's Tumor.

182. The method of claim 180, wherein the cancer is selected from the group consisting of melanoma, colorectal cancer, pancreatic cancer, bladder cancer, breast cancer, triple negative breast cancer, ovarian cancer and lung cancer.

183. A method of treating an infection by a betacoronavirus, the method comprising administering a composition of claim 83 comprising any one or more of (vvv)-(cccc), wherein the composition inhibits the binding of a betacoronavirus to a receptor-ligand on a human cell.

184. A screening method to identify one or more peptide sequences that modulate functional regions of target protein(s), comprising:
synthesizing a library of overlapping gene fragments from one or more genes that express the target protein(s), wherein each gene fragment has a unique nucleotide sequence, wherein each gene fragment from the same gene that express a target protein has a sequence which partial overlaps with the sequences of least two or more gene fragments having nucleotide sequences from the same gene;
pooling and cloning the gene fragments into vectors, wherein each vector overexpresses one gene fragment when transduced or transfected into a cell;
transfecting or transducing cells with the vectors comprising gene fragments, wherein each transduced or transfected cell has only one vector that comprises a gene fragment;
screening the transfected or transduced cells for a phenotypic characteristic associated with target protein activity;
sequencing and quantifying gene fragment abundance from cells exhibiting the phenotypic characteristic; and
mapping the sequenced gene fragments back to the gene that express the target protein and providing a modulation score for each codon, wherein the modulation score is defined as the mean depletion/enrichment of all overlapping sequenced gene fragments, and wherein codons of the gene fragments which have a modulation score above or below a p=0.05 significance threshold, indicates peptide sequences which modulate functional regions of the target proteins.

185. The screening method of claim 184, wherein the library of overlapping gene fragments is synthesized using pooled DNA oligonucleotide synthesis on a solid substrate.

186. The screening method of claim 184 or claim 185, wherein the gene fragments are 60 nucleotides to 300 nucleotides in length.

187. The screening method of claim 184, wherein the gene fragments are 120 nucleotides in length.

188. The screening method of claim 184, wherein the target protein(s) are associated with a disease of disorder.

189. The screening method of claim 188, wherein the disease or disorder is cancer, Alzheimer's disease or a neurodegenerative tauopathy disorder.

190. The screening method of claim 184, wherein the genes expressing target proteins are tumor suppressor genes, pro-apoptotic genes or oncogenes.

191. The screening method of claim 184, wherein the vectors are viral vectors.

192. The screening method of claim 191, wherein the viral vectors are recombinant retroviral vectors, adenoviral vectors, adeno-associated viral vectors, alphaviral vectors, or lentiviral vectors.

193. The screening method of claim 192, wherein the viral vectors are lentiviral vectors.

194. The screening method of claim 184, wherein the phenotypic characteristic is cell growth.

195. The screening method of claim 184, wherein the phenotypic characteristic is immunostimulatory/immunosuppressive activity.

196. The screening method claim 184, wherein the phenotypic characteristic is neurodegenerative tauopathy.

197. The screening method of claim 184, where the modulation score is a depletion score indicating that the identified peptides inhibit or suppress the functional activity of target proteins.

198. The screening method of claim 184, where the modulation score is an enrichment score indicating that the identified peptides enhance the functional activity of target proteins.

199. A screening method to identify one or more peptide sequences that inhibit functional regions of target protein(s) expressed by oncogenes, comprising:
synthesizing a library of overlapping gene fragments from one or more oncogenes that express the target protein(s), wherein each gene fragment has a unique nucleotide sequence, wherein each gene fragment from the same gene that express a target protein has a sequence which partial overlaps with the sequences of least two or more gene fragments having nucleotide sequences from the same gene;
pooling and cloning the gene fragments into vectors, wherein each vector overexpresses one gene fragment when transduced or transfected into a cell;
transfecting or transducing cells with the vectors comprising gene fragments, wherein each transduced or transfected cell has only one vector that comprises a gene fragment;
screening the transfected or transduced cells for cell growth over various time points;
sequencing and quantifying gene fragment abundance from each of the time points; and
mapping the sequenced gene fragments back to the oncogene that express the target protein and providing a depletion score for each codon, wherein the depletion score is defined as the mean depletion/enrichment of all overlapping sequenced gene fragments, and wherein codons of the gene fragments which have a depletion score below a p=0.05 significance threshold, indicates peptide sequences which inhibit functional regions of the target proteins expressed by the oncogenes.

200. The screening method of claim 199, wherein the library of overlapping gene fragments is synthesized using pooled DNA oligonucleotide synthesis on a solid substrate.

201. The screening method of claim 199 or claim 200, wherein the gene fragments are 60 nucleotides to 300 nucleotides in length.

202. The screening method of claim 199, wherein the gene fragments are 120 nucleotides in length.

203. The screening method of claim 199, wherein the vectors are viral vectors.

204. The screening method of claim 203, wherein the viral vectors are recombinant retroviral vectors, adenoviral vectors, adeno-associated viral vectors, alphaviral vectors, or lentiviral vectors.

205. The screening method of claim 204, wherein the viral vectors are lentiviral vectors.

206. The screening method of 199, where the oncogenes includes one or more oncogenes selected from MCL-1, BCR, BRAF, JAK1, JAK2, VEGF, EGFR, ALK, CDK1, CDK2, CDK3, CDK3, CDK4, BRCA, PIK3CA, MEK, C-KIT, NRAS, ABCB11, ANTXR2, BCOR, CDKN1B, CYP27A1, EMD, FANCF, ABCC8, APC, BCORL1, CDKN2A, CYP27B1, EP300, FANCG, ABCC9, AR, BLM, CEP290, DAXX, EPCAM, FANCI, ABCD1, ARID1A, BMPR1A, CFTR, DBT, EPHAS, FANCL, ABL1, ARID2, RAF1, CHEK1, DCC, EPHB2, FANCM, ACADM, ARSA, BRCA1, CHEK2, DCX, ERBB2, FAS, CADS, ASAH1, BRCA2, CHM, DDB2, ERBB3, FAT3, ACADVL, ASCC1, BRIP1, CIC, DDR2, ERBB4, FBXO11, ACTC1, ASL, BTD, CLN3, DES, ERCC2, FBXO32, ACTN2, ASPA, BTK, CLNS, DHCR7, ERCC3, FBXW7, ACVR1B, ASS1, BUB1B, CLN6, DICER1, ERCC4, FGD4, ADA, ASXL1, CALR3, CLN8, DIS3L2, ERCCS, FGFR1, ADAMTS13, ATM, CARD11, COL1A2, DKC1, ERCC6, FGFR2, ADAMTS2, ATP4A, CASP8, COL4A3, DLD, ERRFI1, FGFR3, AGA, ATP6V0D2, CAV3, COL4A4, DMD, ESCO2, FH, AGL, ATP7A, CBFB, COL7A1, DNAJB2, ESR1, FKTN, AGPS, ATP7B, CBL, COX15, DNMT3A, ETV6, FLCN, AHI1, ATP8B1, CBLB, CREBBP, DSC2, EXOC2, FLT3, AIP, ATR, CBLC, CRLF2, DSE, EXT1, FMR1, AKAP9, ATRX, CBS, CRTAP, DSC2, EXT2, FUBP1, AKT1, AXIN1, CCDCl78, CRYAB, DSP, EYA4, FZD3, AKT2, AXIN2, CCNE1, CSF1R, DTNA, EZH2, G6PC, ALB, BAG3, CD79A, CSMD3, ECT2L, F11, GAA, ALDH3A2, BAI3, CD79B, CSRP3, EDA, F5, GABRA6, ALDOB, BAP1, CD96, CTNNB1, EDN3, FAH, GALNT12, ALK, BARD1, CDC27, CTNS, EDNRB, FAM46C, GALT, ALS2, BAX, CDC73, CTSK, EED, FANCA, GATA1, AMER1, BAZ2B, CDH1, CUBN, EGFR, FANCB, GATA2, AMPD1, BCKDHA, CDH23, CYLD, EGR2, FANCC, GATA3, AMPH, BCKDHB, CDK12, CYP11A1, EHBP1, FANCD2, GATAD1, ANTXR1, BCL6, CDK4, CYP21A2, ELMO1, FANCE, GBA, GCDH, JAK1, MDM2, NEK2, PLOD1, ROS1, SMPD1, GJB2, JAK2, MECP2, NEXN, PLP1, RPGRIP1L, SOX10, GLA, JAK3, MED12, NF1, PMP22, RS1, SOX2, GLB1, JUP, MEFV, NF2, PMS2, RSPO1, SPEG, GLI1, KAT6A, MEN1, NFE2L2, POLD1, RTEL1, SPOP, GLI3, KCNQ1, MET, NFKBIA, POLE, RUNX1, SRC, GLMN, KDM4B, MFSD8, NIPA2, POLH, RUNX1T1, SSTR1, GNA11, KDM6A, MIER3, NKX3-1, POMGNT1, RYR2, STAG2, GNAQ, KDR, MITF, NOTCH1, POMT1, S1PR2, STAR, GNAS, KEAP1, MKS1, NOTCH2, POU1F1, SAMD9L, STK11, GNPTAB, KIF1B, MLH1, NPC1, POU6F2, SBDS, SUFU, GPC3, KIT, MLH3, NPC2, PPM1L, SCN11A, SUZ12, GPC6, KLF6, MMAB, NPHP1, PPP2R1A, SCN5A, SYNE3, GPR78, KLHDC8B, MPL, NPHP4, PPT1, SCNN1A, TAZ, GRIN2A, KMT2A, MPZ, NPM1, PRDM1, SCNN1B, TBX20, GRM8, KMT2C, MRE11A, PRKAG2, SCNN1G, TCAP, GXYLT1, KMT2D, MSH2, NRCAM, PRKAR1A, SCO2, TCERG1, H3F3A, KRAS, MSH3, NTRK1, PRKDC, SDHA, TCF7L2, HADHA, KREMEN1, MSH6, NUP62, PROC, SDHAF2, TERT, HADHB, L1CAM, MSMB, OR5L1, PROP1, SDHB, TET2, HBB, LAMA2, MSR1, OTC, PRPF40B, SDHC, TFG, HESX1, LAMA4, MTAP, OTOP1, PRX, SDHD, TGFB3, HEXA, LAMP2, MTHFR, PAH, PSAP, SEPT9, TGFBR1, HEXB, LDB3, MTM1, PALB2, PSEN1, SETBP1, TGFBR2, HFE, LEPRE1, MTOR, PALLD, PSEN2, SETD2, THSD7B, HGSNAT, LIG4, MUC16, PAX5, PTCH1, SF1, TINF2, HIST1H3B, LMNA, MUT, PAX6, PTCH2, SF3A1, TMC6, HNF1A, LPAR2, MUTYH, PBRM1, PTEN, SF3B1, TMC8, HRAS, LRP1B, MYBPC3, PCDH15, PTGFR, SGCD, TMEM127, HSPH1, LRPPRC, MYC, PCGF2, PTPN11, SGSH, TMEM43, IDH1, LRRK2, MYD88, PDE11A, PTPN12, SH2B3, TMEM67, IDH2, LYST, MYH6, PDGFRA, RAC1, SLC25A4, TMPO, IGF2R, MAP2K1, MYH7, PDHA1, RAD21, SLC26A2, TNFAIP3, IGHMBP2, MAP2K2, MYL2, PDZRN3, RAD50, SLC37A4, TNFRSF14, IGSF10, MAP2K4, MYL3, PEX1, RAD51B, SLC7A8, TNNC1, IKBKAP, MAP3K1, MYLK2, PEX7, RAD51C, SLC9A9, TNNI3, IKZF1, MAP4K3, MYO1B, PHF6, RAD51D, SLX4, TNNT1, IKZF4, MAP7, MYO7A, PIK3CA, RARB, SMAD2, TNNT2, IL2RG, MAPK10, MYOZ2, PIK3CG, RB1, SMAD4, TP53, IL6ST, MAS1L, MYPN, PIK3R1, RBM20, SMARCA4, TPM1, IL7R, MAX, NBN, PKHD1, RECQL4, SMARCB1, TPP1, INVS, MC1R, NCOA2, PKP2, RET, SMC1A, TRAF5, IRAK4, MCCC2, NCOR1, PLEKHG5, RHBDF2, SMC3, TRIO, ITCH, MCOLN1, NDUFA13, PLN, RNASEL, SMO, TRPV4, TRRAP, U2AF1, USH1C, WAS, WWP1, ZIC3, TSC1, U2AF2, USH1G, WBSCR17, XPA, ZNF2, TSC2, UBA1, USP16, WEE1, XPC, ZNF226, TSHB, UBR3, USP25, WNK2, XRCC3, ZNF473, TSHR, UROD, VCL, WRN, ZBED4, ZNF595, TTN, UROS, VHL, WT1, ZFHX3, HER2, and ZRSR2.

207. The method of claim 206, wherein the one or more oncogenes are selected from KRAS, HRAS, NRAS, RAF1, BRAF, ARAF, Myc, Max, FBXW7, and EGFR.

208. A peptide comprising a sequence that inhibits functional regions of target protein(s) expressed by oncogenes identified by the method of claim 199.

209. The peptide of claim 208, wherein the peptide inhibits the functional regions of EGFR and has the sequence of EGFR-697 or inhibits the function regions of RAF1 and has the sequence of RAF1-73.

210. An isolated polypeptide or peptide comprising, consisting essentially of or consisting of a sequence that is 85%, 87%, 90%, 92%, 94%, 95%, 98%, 99% or 100% identical to any one sequence as set forth SEQ ID NOs: 1-9489.

211. The isolated polypeptide or peptide of claim 210, wherein the peptide inhibits cancer cell growth, invasion, metastasis, and/or migration or inhibits the ability of a betacoronavirus to infect a cell.

212. The isolated polypeptide or peptide of claim 210 or 211, further comprising a cell penetrating peptide (CPP) linked to the N-terminus or C-terminus of the isolated polypeptide or peptide.

213. The isolated polypeptide or peptide of claim 212, further comprising a peptide linker between the CPP and the polypeptide or peptide.

214. A nanoparticle linked to a polypeptide or peptide of claim 210 or 213.
